United States Patent Application Publication US 2020/0377945 A1 - sequence listing, part 29

SEQ ID NO: 5139 - DNA, 124657 bp, Unknown
  gut microbiota DNA sequence
cagattttttctgcggttaaggagctgtttatggagattaacagtatagatattgttgaggatcctgatcgtgaaatatatatggtggcaatagatgtatatggaaaaagattattgcagcatgaaatatccaatggaatgttaaaaacgatatactatattgttgagttgatcactatgtcaaaaaactctttagtattaatagatgaatttgagaatggattaggggtaaattgtatagatgtattggcagaactattattgggggaaagaagggatttacagtttgttattaccagccatcatcctaaaattataaaccagatttcaaataagaaatggaagatcattgaaagagacattgcgacggtaaaaaattttacagctgaagagtatggaatcatgcatagtcagcatgatgcatattttaatttgataaacagatgggaatttgaaggtaagatataaatgaattattattttttgcttgaagatgaaaagtcctttataaaggttttgcctgaatggttaaaatatatggggatacaaaacaccagagtgcaggatattacatatgttcgggaaaataattatgtgatgcagagcggacaaggtgttacgcagctgatcacaagagttttattccagacgatagatacaattctgctgaatccgggaaaaatagatgaattaatagtgattttggattcggaagaatataatgaacaagaacgaaaaaaacaggttgaaaacattatcaaggaatatattgacaagaagaattgtgctgtagattttttatataaagtttttgtctgcaatcattgttttgaaacatggcttttaggaaatggtaatttatatccggatattagaccggaaggagattttcagccatattacgacaagtataatataaaagtaaatgatcctgaattaatggctgtgccggacgatataaaagaaacgatagctgtttatcatttccattatttacatgaaatgtgcagatataacagagtacggtacagtaagaaaaaacctatggagatggcaaaaaaagcatactttgatacgctggtatcaagaatagaaaatagtgatcacttacattcatttgctcagttttatgagtactttgtaaatgaacaaaaatgactattcaaccgataataaaatgccgtacgatcaaccgaccgtacggcattttcctacctttcataaatcgtataatgatgtttcttaagcagtgcaaccgccagcgctaatgattccccgtcatacatttcaagtctcaaaacaccgccttcaaactcacggttgtgaatgatcccgatatttttgatacttaaattattgctcgcaaggatcgttgcgacggtggcgatcccaccggtctcatcgatcaggtctaagtacagttcgtaaacattcttcaaagcaccttttgccgtgattgtgatggaatcacggtaatctttggctgcagtaaaggcatctaacagtgcaggggaatctgcatctgcaatgttcgtgcgcattacctctaatgtatggatatagctgtccaataattttaaaatctgttcctgattggataaacagatattttcccacatgacaggagaagaagatgcgatacgcgtgatatctttaaaacctccggctgcgatggttttcatgatctcattttcatcgtccgattcccgcaccaggttgacaaggctgtatgcgatcacatgcggcagatgactgatcgctgcggtcgcataatcgtgctgctcataacctaaaaccagaggaattgcgccgagagagcgcaccagcccggtcagttcttccacagcaggggaaggactctttgtggtcggtgtgataatatagtaagcattttccaaaagcgtctctgaagcattagaaagaccggtcttctcagaacccgccatcggatgaccgccgataaaattggcttcaaggccgagtcttatcacttctctgtggatctccgtcttgacactgccgacatccgtgatgatgcagtccggagaaattacatctttcaactgctgcagatattcaatatttctcttggtcggcgtgcacagaaaaatgtaatcacagtctgcgaaatccttcagttcacatggtgtattgtttatgatcaaatgttctttataagcttcggcaactgtttctgcatggtgtgcagttgcaatcattgtaagttccggatgaagtgcatgcagtttttttgcaatggaaccgccgatgagtccgagtccgataaagcctattttctgaagtgacatatataaaaatccccctgttagatgttaaagttctgttctcataattctttacctatcatagacataaattgcaagaaagtcaacacgttaaagtataaaagtgcatattgcatgaaaaaataatcaaagtatggatgaaatgtgaacactatgtaaacattccatgcaaatggttataaattatttaaaatgcatacataatatataaacaaatttcgggtaatataaaaatagttagtaaatatgaataaataagttgtaataaacgtgtaaatttagtaaaatataaccatacagcgaatgccgtttcagaggtatcgactaaaaaatatgtattggaggatttgctatgaacgtttacacaactgacaagattcgtaatgtggttctgcttggacatggtggatgtggtaaaacaagtctcgccgaggcgatggcttatcttgcggggatgacaacacgcatgggaaaagttaccgatggtaacacgatcagcgattatgacaaagaagaaatcaaacgtcatttttccatcaacacaactgtgataccgattgtctggggtgataccaagatcaatatccttgatacacctggttattttgattttgtaggggaggtagaagaagcagtcagtgctgcggatgcagcaattatcgtagtatccggtaaggctggcattgaagtcggcacaaagaaggcatgggagttatgtgagacatacaaactgccgcgtatggtatttgttacagatatggatatcgatgaggcaagttaccggcaggtcgtagaagatttacagcagctatacggcaagcggatcgcaccttttcatcttccgatccgtgaaaacggacagttcgtcggttatgtcaatgtattacagcagcgggcaaaacgctggaaagataacggcgaagtggaaaaggtagaagtgccggagtattccaaagagaatcttggtatctgcagggaagcattgatggaggctgttgcggagacaagcgaagaatttatggatcgttattttggaggggaagagttctccgaggatgagatccgccaggcactccgtgtcaatgtatccgatggaagcatcgttccggtgctgatgggttcgaatgttcttgcacgcggcatgtatacactgatggtcgacattgtaaaatatcttccgagtccggaaaaacgttcctgcaccggaatcaatgcaaagtccaacgaggtatacaatgcagactatgattttgcaaaaccaaaatcagcttatattttcaaaacgattgcagacccgtttattgggaaatattcattgatcaaagttaattcgggagttatcaaaacagatgatcttctttacaaccagcataaagatacagaggaaaaaatcggaaagatctatgtactctgtggcaataagccggaggaagtaaaggaactgcatgcgggagatatcggagcgttagcgaagctgactaaagcagctaccacagattccctttctaccaaagcgaacccgatcctgtatataagaacacagatctccacaccatatacttataaacgttataaggcagtcaacaaaggagatgaagataagatctcgcaggcattgcaaaagctgatgctcgaagatcttacattaaaaacagtcaatgacagtgaaaatggccagacattactttacggtatgggagaccagcaccttgatgttgtggcaagcaaactgttagagagatacaaagttcagattgaactgaaaaaaccaaaagtagcattccgggagaccattcgtaagaaagcggatgtggaatacaagtacaaaaaacagtccggcggtcatggacaatacggtcacgttaagatgacctttgaaccttccggggatcttgaaacaccatatgtatttgaacaatgcgttgtcggcggagcagttccaaaaaacttcttcccggcggtggaaaaaggaatccaggaaggagttgtgaaaggaccgatggcagcttatcctgtggtaggagtaaaggcagtattatatgatggatcctatcatccggtagactcttctgagatggcatttaaggttgcggctcttcaggcattcaaaaaaggcattatggaagcatcaccgattctgttagagccgatcgcatccttaaaagttgttgtacctgacaaatacacaggtgacattatgggagacttaaacaaacgccgtggacgtgtacttggaatgaatccgacggaacacggttatcaggagatcgtagctgatattccttacatggaattatatggatacaacacagatttacgatccatgaccggtggaagcggaacattttcctatgagtttgcaagatatgagcagacaccttctgatatccaggaaaaggagatcgcagagagggcaggcaaacttgataatacggataattcataaaacagtttctgaaagaaacagttcttcccgaaagcaggataaaaacacagactggatgtaacattttccggtgtgtgtaattaaaaagaaaacagggaggaatggatatgcggtatggcagaaaaatttgcaaagaactatttgtaattttatatgtatttatttttcttgtaagcgatccgaaactggttcgtgcctgcagtatgatcatcctccctgatacttcaaaggaaaccattaccagtgataatgttacatttgatttttttgatacacaggatccgtcagagtatcacattgtatatgaggtaaatggcggtattaacagcagcaataatcaaaaaacaatccaaaaagaagaacttccttttacactggacgtgccggttaaaatgggttacaattttgctggctggtatgcagactgtagctattccagaaaagttacgaaaatagatgaagacagtccggcgaatatggttctttttgcaaaatggacaaaaaatattgacaatcattataatgtggaaatgtattcttatcagacaggcacgattcgtgacaacagtcagaaagagttaaaggaatgttcctatacttttttggatgatctttctattccgggaatgccttctaccagggaaaaagactataaggataatctgatcagcagttccagccagtgtatgcagggactttgtttcacaccggattatattcttattactgcatattcggaagatcgcaaaaatcttggatcactgatggtgtttgatcgtgagagcggcgaatatctggtaacacttggcatgaaaaaagaaagtcatcttggcggtattgcttttgatggcgagaatgtctggatctgccattcaaattccaataccttagagcgtatttcctatgaatatattacaaaaatcgcacaggatgcgccggaatattgcattgatgcatcggcattgtcagacgaataccgcctgaaaaatacaccatcctgcattacctgctacggtggcagactctgggttgctacacataccagattttttgattccgagatgtattcatacagctatgataaaaaagaagataagctgacggcagtcagcaactataatcttccgagtaaagtgcagggagtggcattcgatgataacggatcaatttatttaagcacttcctatggaagaaataattcttcttatttaaaagtttattcttctcttctttcattggacaaaaaaccaaatgaaccgaaggtaaaagtggagatgccaccttgttcggaagaagttgctattgcagatggtacggtgtttgttttatttgaatcggcaagtgcaaaatattttgagggtacagatggtatgggaaagagtccggcgccgatcgataaattattagaggtaagtgtagcttccatctggtagacttgagaaaatgttaagaaatcataaataaatatgcagatacaaaaggggtggagtgttccatcccttttattagttaattttgcttccggtctttcatgagccggataattttatcggccttctcagattcctcttttgacatgttttgttttagcagggtgacaagcagctctgtttcggggtctgtgaactggatattatttgtttttgctgcattcatggtgccaagaagaaacggcatcatatctttaatgtttgttggtttttcttttgatgcaaaattcattaaaaactgcagtttttccggggacatattttttaaccccggattattccagaaatcattttccatcactatttattcctttcaaaaatgtaatgctttgttttggcagttttcttacaatatattatgcaaaaatagtctcataggtttccatcatagagaccatatttgtgatcatatcaagtgtttcaagctctttgtctgtacagaatttccgaaggtcatttaacatggcaagagtagaattttcatcctcactgacagagcacatggacatgactttatcctcctggttgaatacctggatcgtattctgtaattccatatatttgatcagaatagcaaattgctttttctggtcacctttcatatagggaatcgcagtttttaacatttgcagttcacgggtctgtgtcatattatcaaagggcgtaaatgaatttggttccataaagatgccttttttcttttagtttatgaacccggaaaatagattatgccagatatcacatggatgaggggacagttttagtgacggtatcaggcagtcggcataaaataaaacgggaggaggaatcaaatatgctgattattgatggaaacagtgtttatgagatagatgaggaatgtgccagaaaaaagaaagtgccaaaggaatgtggaatctacgagaagatgatgcagcagcagaatcgggaaaaagactgtgagtatgctgcacgggatcagaacacaaagcgtccgtaaattcggctgacatacaaaaacgtctcttccataacaggcagagacgtttttctttataaatcttatagggcggccggaatatccgaccgccatttcagaacagatgatctgactagcagaaaccacatccattgtttccgccgcatccaccacagcagaagagaagcaggatgatccaaagacaatcattgttgcctccacatccattgtttccaccgcagaaaccaccattgccgccacagcagcataataagatgatgatccagagaatggaattgcatcctccctcgttacaggaacatccaccaccacagtttgttgcagctaaatcactcatataaaacctccaggttttttcttacactgtatcttatgtgagcgcagaataagtgttacagatttgaataaatttttttgaatatatgattatgtatacttataatttcaggttatagaaaatataaaattttatgccttgacaaataagagaagaaatgtatagaatatagaaaaagtataattgtatacaattatgcatgaaaaaatattcactctaaaagtaaaaatatgcattcatggcataggtgtcaatggcacaagtgccatggcagaaagaaggatttacgttatgagagaagttgtaatgaataagaaaacgaatctgctgcagcttgaagagcatttttatcagttggcagatgtaaaggaaccaaatgtattccacaatctgtttccgtatgatgagatcccgaagatcgcattcaacgatcgaattgttccgcataatatgccggaaaatatctggatcacagatacgacatttcgtgacggtcagcagtcaagggcaccgtataccacagagcagatcgtgacgatctacgattatctgcaccgcctgggcggcccaaaaggtctgatccgccagagtgaattctttttatatagtaaaaaagacagagatgctgtttacaaatgcctggaacgtggttataaatttccggaagttaccagctggatccgtgcaagcaaacaggatttccagttagtaaaagatatcggtctgcgtgaaacaggtattctggtaagctgctctgactaccatattttctataagatgaaaatgacaagaagagaggttatgaatctttacttaagtgtcatccgtgagtgcttagagacaggtatcagtccacgttgccacttggaagatatcacgagatctgatatttacggctttgtcatcccgttctgtgtagaacttatgaaactgatggatgaatataagatcccgatcaagatccgtgcctgcgatactatgggttatggcgttaacttcccgggtgccgtgatcccgcgaagcgtgccgggtatcatctacggtctgaccacacatgcaggtgtgccttctgaactgatcgagtggcatggccacaacgatttctacaaggcagttaacaactccacgaccgcatggctttacggtgcaagcggagtcaactgttccctgtttggaatcggagagcgtaccggtaacacaccgcttgaggcaatggtatttgaatatgcacagttgaagggaacactcgatggcatggacactaccgtgatcacagaactggcagagtattttgagaaagaattaggctatgtacagccgagccgtaccccgtttgtcggcagcaacttcaatgtcacaagagccgggatccatgcggacggacttctcaaaaatgaggagatttacaatatttttgataccggaaaatttttaaacagaccaccattagtatctgtttccaacacatccggtcttgccggaatcgctctctggatcaactcttattatcatcttccgaaagataagagcgtagacaaaaactcagagcttgtgaaaaaagtaaaagtatgggtagataaacagtacgaggatggacgtgttacggtattgaccgataaagaattagtggaagaaattgaaaaatgctgcaaggaattaaatgtaacaataggagcatgaggtgtcatatatgggagaggataattattccttaagttcccgtgtgtttcatacgatccgtgaaaatattttgtccggaaaatatgcgacagacgaggagttaaaggaaaaaaatattggtgaggagttaggtgtcagccgtactccggtgcgtgaggcactccgccagcttgaacttgagggactggttaccattatcccgaataaaggtgcttatgtcgtaggtatttccaaaaaagatattcaggatatctacgagatacggtcgcgtctggagggactgtgtgcaaagtgggcagcggataagatcaccaaggaacagctggatgaactggatgaaaatatatatctgtcggattttcatgctgcaaaaggaaattcggaacaggttgtggaacttgacaaccgtttccatgaaattttatacaatgcttccgacagcaaagaattaaaacatgtgctgcttgattttcatcattatgtacaacgcgtgcgaaaaatcacacttgcagatccgaagcgttccgtacagtcaaatcaggaacacagacagatcgtggaggcattaaagaagcatgatgccggtctggcagagaaactggcgaatgagcacatgatgaacaccattcacaatatggataattacggatgggacaatttatttcaatagaaaaggagaacacaatggaaaaaatcaaaatgacaaccccactggtagagatggacggagatgagatgacaagaatcctctggaaaatgatcaaagatgagttacttcttccgtttattgatttaaagacagagtattatgatcttggattagagcatcgcaatgaaacaaatgaccaggtaaccgttgattctgccaatgccacaaaaaaatacggtgttgctgtaaaatgtgcaacgattacaccaaatgcagcgcgtatgactgaatacaacctaaaagaaatgtggaagagtccgaatggtacgatccgtgccatgttagacggtacggtattccgtgcaccgatcgttgtaaaaggcattgagccatgtgtcaaaaactggaaaaagcccatcacgattgcacgtcatgcctatggtgatgtatacaaagcatccgagatgaagattccgggagcaggtaaatgtgagctggtttatactgcagaggacggcacagaaacaagagaactgattcataactttaccggagcaggtgtcgttcagggacagcacaacctttgcaattcgattgagagttttgcaaagagctgttttaactatgcacttgatacaaaacaggatctgtggtttgcaacaaaagatacgatttccaaaaaatacgatcacacatttaaagatattttccaggagatctttgatgcagaatacaaagaaaaattcgaaaaagcaggcattacttatttctatactttaattgatgatgcggttgcccgtgtgatgaaatctgaaggcggttatatctgggcatgcaaaaactatgacggagatgtcatgagtgatatggtttcaagtgcatttggttcgcttgccatgatgacttccgtgctggtttctccggatggctattatgagtatgaggctgcacacggaacggtacagcgtcattattacaaacacttaaaaggtgaggaaacatccacgaactctgttgcaaccatttttgcatggacgggagcccttaaaaaacgtggcgaacttgattcgaatgctgcattgtccgattttgcagaaaaactcgaaaaggcttgtattaagaccattgaagatggtaaaatgacaaaagaccttgcgctgattactacgaatccgaatccggtcgtattaaacagcgaagattttatcaaggcaatcagaacgacgttagaggaaagtttaaaatgattttgtcatgtcagagtatctcaaagtcttttggaacagatgagatattaaaagatgtaagttttcatattgaagcaaatgaaaaagcagcgattgtcggcatcaatggtgccggcaagtctacgctgcttaaaattattatgggtgaagaaacgtccgatgccggtgaagtgattcttgcaaaggataagacaatcggctacttagcacagtatcaggatgtatccggtcacagaaccatctatgatgaggttctttatgcaagaaccgatattctggaaatggaacagaaacttcgtgatatggagtctgagatgaacagccgtaccggtgaagaattagaaaagctgatggatatttatcaccgccagagccatgaatttgaactgcagggcggatatgcataccgcagtgaagtgaccggtattttaaaaggacttggtttttcagatgaagatttgagcaaacagatgagcgagttatccggaggacagaaaactagagtttcccttggcaaacttttagtcacaaagccggatgtactgcttttagatgagccgacgaaccatctggatatggagtcgatccgctggcttgagaattttctgcgggcttacaaaggggctgttgtgatcgtagcacatgaccgttattttctggatcgtgttgtcacaaaagttgtagagattttccagcataaagcgtatgtatatcagggaatttattcggattttgcaaagaaaaaagcaaaagttcgtgaagatctgttaaaacagtattacaaccagcagcgtgagatcagacaccaggaagaagttattacaaaattaaaatcattcaaccgcgaaaaatctatcaagcgtgcggaaagccgtgagaaaatgttagataagattgaacgcattgaaaagccggttgaggataatacggatattaagatcgtgttagagccaaatgtggtcagcggaaatgacgtccttaccgtgtcaaatcttgcaaaatcctatccgccggtcacattgttttcggatatttcatttgagatcaaacgtggggaacgggtggcgctgatcggtaacaatggaactggtaaaacgaccatactaaagatcatcaataatctgattccggcagatggcggtaccgtgacacttggttcgaatgtgcatatcggatattacgatcaggaacatcagcttttacatatggaaaagacgatctttgaggaaatctcagatgcctatccgggactgaataatacgaagatccgcaatgtgttagcagcatttttgtttacaaatgatgatgtgtttaagcgcatttcagatttgagcggtggagagagaggacgtgtttccttagcaaaattaatgctttccgatgcgaattttctgattcttgatgagccgacgaaccatttggatattacatccaaagaaattttggaatctgcgttaaaccagtataccggaaccgtatttttcgtttcccatgaccgctattttatcaatcagacggcgacgaggatccttgagctgacaggtgagacggttgtaaattatattggaaactatgattattatctggaaaaacacgatatcatgacgcaactgtatgtaaaaccacaggaaatatcggatattcaggcaggaaaacaggatgatgcggtcaataaacttgactggcaggcgcagaaggcagaacaggcaaggatccgtaagattgaaaacagtctgaaaaaaatagaagatgagattgcagcattagaagaagagataagcgcgatcgataaagaatgtgcgaagccggaaaatgcagtcaattccgcaaagttaaatgaacttgctggacgacagcaggagtgcagggaacgccttgaaatctgctatgaaacgtgggaagatctgtcaatgcagctggatggagctaaagatagttaaaaatttcacacattgacagacacaggggaaatcactataataaacgagagaacgtaagaaaggtggaaccttttgtgcaggaaaaagagatatcacaggcagtgatccgaaggatgccgcgttattaccgttacctcggagaactattagatgccggtgtggaacgtatatcatccaatgatctgagcaaacggatgaatgtgaccgcatcccagatcagacaggatctgaataattttggcgggttcggtcagcagggctacggctataatgtaaaatatttatatgaagagatcggtaagatcttaggtttgaatgagagacacaatattattgtaatgggtgccggtaaccttggtcaggcacttaccaattatgtaaaatttgagaaacttggctttgttatcataggactttttgatgtaaatccggcgcttgacggagtgactgtacgcgggatcaaaatccgtatgttagatgaattagagagtttctgtgaagaaaatcaggtagatatcgcagcgctgaccatgccgaaggaaaaggcagatgcgattgcaaacaggctggtcggacttggaatccgcgcaatctggaattttgcccatgtagatcttgaattgatcgacaaaaatgttgtcgtggagaatgtacatctttccgacagtctgatgcagttgtcttacaacattgtcagaaacaaaaagcagaagaaaacggcaactgaaaaggtgctgtaaatgtagagagcaaatagctgccgcacagatttatgtgcggcgttttttgccttataaaacaaggagaaaaatcctgcacagcttgctgggcattgctcctgcataggcgcatgctatgcaaaagcggcatagcaggcattttgctccgcaaaacaaggaggatttcatgaaatatcttgtagacagccgggaaatgcaaaaatatgatgcaaataccatttcacattttaaggtgccgggacttctcttgatggagcgcgctgcaatagcatttgtggaagagctgcatagacaaaatgtggatcttacggaagtactcattgtgtgtggcagtggaaataacggtggagatggtcttgcgatcgcacgccttttatttttggaaggacatgctgtcacggtcgtttatgccggaaataaagagcactgttcggagtcaaacagggtacagcaggatattttaaatgcatacggtatttctatatacatggatatcccggaaaagataagacctactcttgtaatagacgcaatatttggtgtgggactctcaagagatgtgaccggtgaatatgcagatatgctgtgccggatgaatgaactttccggggaaaaagcggcggtagacattgcatccgggatctctgcggacacgggagccattcttggcacagcgtttcgtgcagatcttacgatcacatttgcatttgaaaaattaggcagtatcctctggccgggaaatgagtatgccggcaggatcattgtatgtgatattggcatcacgaaagaaagctggctgggtgaaccgccgaccgtgatggcacttgaagaaaaagatttttcgatactgccaaaaagaaaaaaccattctaataagggcagttatggaaaactcttgctgatcgccggaagtgtcaatatggcaggggcggcagttttgtctgcgaaagcagcttatgccacggggtgtggtctggtgcgtgtgctgactccgggggaaaacagaactattttacagtgcagtgttccggaggcggttcttactacttacgataaaactttagtaccggaagaaccggttctgagggagatccttgactgggcagatgccattgtgatcggtcccggactaggaaaagaaaaaacttctgcacagatattaaattttgtgttagaatatggaacgtcacatgagaataaagcatttctttttgatgctgatgcattaaatctggtggcagagcagaaaaacaccggagtgcagggggcagatagatggaaaaattttaagaatactgccgtgattacaccgcatcttggagagatgagcaggcttaccggaaaaacagttggagaaatccagaagaatctgctgcagacagctgcagattttgcagatgaaaatcaggttatttgcgtcctgaaagatgaacatacagtgaccgcactgccggatcataaaaggtatctgaatctttccggtaatccgggaatggcaactgcaggaagcggggatgtactaagcggtttgatcggtgcacttatggcacagaaactgacatcatatcaggcggcacctcttggagtatactttcacggtttggcaggtgatatcatggtacagacgacaggtttacagggccttacagcctcggatctgatcaccgggatcaaaaaggtactaaatatttacacacaacagtaaaagcgcgtatagattttgtgttgaacaaaaaggtaatgaaaaaaatagattggagaacaacatgaacagatacagcagagtgcatgcggagatcgatctggatgcaattcttcacaacatggatgcaatgcgtgggaacattgcaaaagatacaaaaattatggcggtcatcaaggctgacggctatggacatggtgccgtagagattgcagagacgattgaaaaacttgattatctatacggttatgcggttgccacggtggaagagggactgatccttcgaaatcacgggatccagaaaccaatcctgatcttaggatatgtgttcccggatcagtatgtggatatgatcaaagcgggcatccgtccgaccgtatttaccagagagatggcagaaaagctttccgttgcggctgcaagtatcggcagggactgcaagattcattttgcaattgataccggaatgagccggatcggttatcaggttacggaagaagctacggatgagatggcacagctttcaaaactaccgcatattatagtggagggtatttttacccattttgcaaaagcagatgaaaaagataaggagccgacataccagcagataaaacttttccgtaaaatgatcgacatgttagaagaacgcggggtaagtatcccgattcaccactgctcaaacagtgcaggaattgtcgatatcccggaggcaaacatggatatggtgcgtgcagggattacgctttatggaatgtggccgtctgaggacgtggataagacggcaatcagcttaaaacctgcattatcgcttgtgacacatgttgcatatgtaaaagagcttccggctggcagggcaatcagttatggcggaacttatgtcacaaaagaaccgcgtatgattgcaacgatcccggtcggttatgcagacggctacgcgagaggactttcaaacaaaggagctgttctgatccacggaaggcgtgcaccgattcttggtcgtgtctgtatggatcagtttatggtagatgtcacagatattccggatgttaaaaatgaggatgaagtgatactgatcggcagggatggtgatgagtgcattaccatggaagaggtcggcgggttatccggacgttttaattatgaattcgcctgtgatcttggaaaacgtataccacgtgtttatatccatggtggacggatcatcggtacgagagatcatttttcggaataatagaaaggaatggaatacaccagtaaaaattggcaatactatccgtaaagcaagaaaatggagtggaagtatatggtaattagacgtggtgatattttttatgcagatttaagaccggtcatcggctcagaacagggcggtgtaagaccggtgctcataatacagaatgatgttggcaacaggcacagtccaaccgtgatctgtgcagcaattacatcccagatgaataaagcgaagcttccaacacacgtagaacttgacagcagaaaatatgatctggtcaaagattctgtggtgctcttagagcagcttcgcacaatcgataaaaaacgtttgaaagacaaggtatgtcatttagattcccagattctggtgaaaatagataaggcgcttgaggtaagcttagagttgtatacataaataggcttgccagaaaacggaaatagtgataaaataaaatgtattttcgaagcaataaacaagtgagaaaagaggaagtatttatgtcaggacattccaaatttgcgaatattaagcacaaaaaagaaaaaaatgatgcagcaaaaggaaagatttttacaattatcggacgtgagattgccgttgcagtaaaagatggcggcccggatcctgcaaacaactttaaactggctcaggtcattgccaaagcaaaagcaagtaacatgccaaatgatacgattgagcgtggtatcaaaaaggcatccggtgaaggaaactctgtcaattacgagtactgtacctatgagggatatggtccgagcggaacagctatcatcgtaaaatgtctgaccgacaataagaaccgcacagctgccaatgtccgtaacgcatttacaaagggacacggaagcatcggtacacagggatgcgtttcctatatgttcgatgaaaagggacagatcattatcgcaaaagaagactgtgagatggatgcggatgatctgatgatgatcgcacttgatgcaggcgcagaggatttttctgaggaagatgacagctacgagatcatcacaaatccaaatgattttgaggcagtacacgctgcacttgaagcagagaagatccctatggcagaagcagaggttacaatgattccacagaattatgtagagctgacagcagaggaagatttaacaaatatcaaccgtattcttgatctgctggatgatgatgatgatgttcaggaagtatatcacaactgggatgaataaataagattcaaggtacataagataaacggcatggatgaaaagtctgtgtcgttttttatatgaaaataaaagtttttttacattgtattaaatttttctgctttgcagtaaaaaaatatggtattcttttcggaaatgttatatgataatagtaattaagatttgaagaataaacacaggaatggagattgctatgaagaaaatactttttgcagcatcggagtgtgttccgtttattaaaaccgggggtttggcagatgtatgtggagcattgccgaaggaatttgacaaaaacgagtgggatgtccgggttgtaataccgaattacagctgcataccggacaagtttcgcagcaagtttgaatatgttgctcatttttatatgagtgccggcagttatattacgaataagtatgtcggtattttaaaatatgtcatggatggcattacatattattttattgataatcaggaatattttaactgtgcagtaccgtacggtgatgtccgttatgatattgaaaaattctgtttctttgacaaggctgttttgtccatgttaaaacagatcgacttctgtccggatatcattcactgtcatgactggcagacgggtctgattccggtatatctaaaaaatgaatttcaggctgattccttttactggggcatgaagagtattatgacgatccacaacttaaagttccagggagtatgggatatcaagaccatgcagggactgaccggattttcagcttccctgtttacaccggataagctggaatttaaaaaagatgccaacatgttaaagggtggtcttgtctatgccgattatatcactacagtcagtgattcctatgcacaggagattcagaccgagtattatggagaaggtttaaatggtctgttgtctgcacggcattttgatatgcagggtattgtaaacggtattgattatcaggtatatgatccggcagcggatacaaagatttataccaactataagccgtctgatttccgtaagaaaaaatacatgaataaggtaaaattgcaggcagaattaggacttgccgttgacaagaaaaagtacatgatcggtctgatctcaagactgaccgaccagaaaggtttagatcttgtaaattatgcaatcgaccggatcgtggacgactatacacagctggttgttatcggtaccggagatccgcagtatgaaaacatgttccgccattatgcatggaaatatggcgatcgtgtttctgcaaatatctgttattccgatgaacttgcacacaaactgtacgcagcagcagatgcattcctgatgccgtcccgcttcgaaccgtgtggcctgacacagcttatttcattccgctacggtacagttccgatcgttcgtgaaacaggtggactgagagatacggtaaaaccatttaacgaatatgaaaatacgggagacggtttttcctttgcaaattataatggagatgaaatgctttctgtgatcaattattccaaacatattttcttcgaccgcaggaaacagtggaaccagatgattgaccgcggcatggcaaatgattattcctggaacaattccaaaggaaaatacgagggattatataattatctgctcggatgttagtaatgcttttttaaaataaagatatataaaagaaacgtaaaattgattttctgtatgattattttacagacggatatactaaatgagaatatcgtataaaaaacaggatgtttcaaacatcctgttttttatatcatggaaaaagagtatagtgtgaaaaataagatttttcacacgcaagatttgtgcttgcgcacaaacttgagatgcgcaaaaaacagcgcaggaatggagaatatcatggcagaaaatcaggaaaagaaaaatgaggagatcagagagtttggacagatccagatgaaaaataaaatttcattgctgacgatcatcggggagattgagggacatgactgtcttccggcaaccacaaaaacgacgaaatatgagcatgttcttccaaaactggcagagctggaagataacccggatacagaagggctgctgctgcttttaaatacggttggaggtgatgtggaaagcggtcttgcaatcgccgaaatgatcgcatcgatccgcaaaccaacggtttcattagtccttggcggcagtcattccatcggtgtgcctttagcggtatcgaccgattattcgtttattgtgccatccggaaccatggtgatccatccggtgcgcatgagtggaaccgtgattggtgcaaaaccgacgtacgactattttaaacagatgcaggaccggatcgttcactttatcagcacccattcgaaagcaagtgaaaaacgtctggaggagctgatgatgaatacaggaatcctcacaaaagatcttggtacaatcctggtcgggaaagaagcggtggaggaaggactgatcaatgaagtcggtggtatttccgatgcattttcccgactgcatcagatgatagaaaaaaaataaccagttaatgacaatctgcctcaaatatggtaagataaaatatgtatgtaaaaagttaccgcaaaagaacgatttattacgaagatacaaagaggaggcagatatgtcattattacaggcaatactaatggggatcatacagggtttaacagaatttttgccagtgagcagttccggacatctggcgatttttaagatattatttggtgtggatacagacacaggacttctgtttgatgtccttttacatatcggaacattagcagcaatctgcattgtttactataaagatgttttaaaaatgatcgtggagggaatcggaatcatcagagactgttttattaaccttatccggtttatcggaaataaaaccggtaagacagacgaaccttacctccggatcgtaaacagcagttaccgtaaattagtcgttttgatcattgtatctaccattccaaccggaatcatcggtgtggttggaaaagatgttgtcgagatggcatcggagatattgctgataccgggtatctgcctgatccttaccgctgtcctgctttttattgcagatcataccagagatggagaaaaattgccaaagagcgttacatatacaaatgcatttggagtcggaatagcacagggaatcgcaacacttccgggattgtcacgttccggaacaacgatcacggcatgtctgctcagcggctttaaccgcaattttgccgtaaaatactcatttttaatgtcaataccggcaattcttggagcactggtactggaattaaaagactgcacggcagttgcactttccggtgcagagattgcatattatgtagttggtatgatcatagccgcagtggtgggatatgtctgcattaagacaatgcttatcgttgtacgcagaaaaaaatttacaggttttgccatttactgtctgatcgtgggtgtgatctcgattggcggatatatctatatggcataaataaatgcaatatatctgtgcatttacagaaattgagttggaggtaatattttggcaacagggaataggaagcgttctgctaccggaaaaaaatcatcatccggcaggaaaacaaattctggacataagagaaatacaaaaaaacagcaggagcgtgaagctgaatttacgcgtgaggtgattttatggatcgtggttgctgtttcacttttgctgtttatcagtaactttggatttggcggtacgatcggcggtacagtcagccgcttcttttttggtttatttggaattatttcatatatatttccaatcgtattactggtggggactttttttgccgtttcgaaccagggaaaccgggtggcagccgtaaaattagtggcggtcattttgtttgtggcatttttatgtatgttttttgaactcatttccgatggaactgatgcaaaaagtgcaatggatgcttatcggtacagttttgatgcaaaaagtggaggcgggctgatcggaggcggactttcccatatgttatgctccggatttggagtgatcggggcatatgtgatcgatgtgatcgtactcattatctcgcttgtactcatcacggagcgatctgcatttcgtggcatgcaaaaaggtgggcgcagggtgtatgagtctgccaaaatcagcaatgaacgtcacagagaacgtgttgaaatgcgaagagaagagcgtgagcagcgggaacagcagcgcagaatggacagaaaggttgagggcgttgccattgatacaaagctgattccggatacgccgcagaaacgttcccaggatatcagtgagattctgccggaagatatgatcgatttgccggagatcaaagaggaaaaacatgtcacactgactgcaggaagtacgatatcaaatacaacaccatctgcattttcagatgaggcattagatgcaatgggacaggcgctgacagcaaaaacagagttgtttgcggcagaggaggagcaggtatcgttcccaatacagatggaagaaccgaaagcttcacggacagttgcagaggaagcaccgtttgctatacctggacgccctgatccggcgatggcatttggaatggagcagggggcagaggagattccatatgaggaagaaacggatactataccgttatttggggcagatttagaatctgagccgctgccggaagaaactgctgaagatgtgctgccggtgcagcatgaaacagtagtacagacgaaagatatggataacattccggaaaagatggatgttgaaatcgtaccgccggagaaagaatatgtcttcccgccggttacgctgttaaaacaggcagaaaacaagcagggagataccagaaaacagttgcaggaaactgccatgaaactgcagcagacattaaaaaattttggtgtcaatgtcacaatcacgaatatcagctgtggaccggcagtaaccagatatgaactgcagccggaaatgggtgtaaaggtaagtaaaatcgtcaatttggcagacgatatcaagttaaacctcgctgcagcggatatccgtatcgaagctccgattcctggaaaagcagcaatcggcatcgaagtgccgaacaaagaaaatgtcatggtatcgttccgtgaactggtggaatcagaggagtttcagaaccatccttcaaagatctctttttgtgtcggaaaagatatcggcggtaaagtatctgtggctgatatcgaaaagatgccgcatctgctgattgccggtgcgacggggtccggtaaatccgtctgcatcaatacgattattatgagtattttgtataaggcagacccaaaggatgtcaaactgctcatggttgacccgaaagttgtagagttaagcgtttataatggtattccacatcttctgatcccggttgtcacagatccgaaaaaagcggcaggtgcgctgaactgggctgtggcagagatgactgaccgttataataagtttgcggaggcgcacgtccgtaacttaaagggatacaatgccaagatcgacagccttccggatgtggaaggagaaccaaaaccggaaaaaatgccgcagatcgtcattatcgtagatgagttagcggatttgatgatggttgcgtcgaatgatgttgaaggcgcaatctgccggctggcacagctcgcgcgtgctgcaggcattcatctgatcattgcaacacagcgtccttccgtcaatgtcatcaccggactgatcaaggcaaatatgccgagccgtattgcattcgcggtaacatccggtattgattcgcgaacgattcttgatatgaacggtgcggaaaaactgcttggaaagggagatatgcttttctatccgcagggaattccaaaaccggtgcgtgtacagggtgcgtttgtttcagataaggaagtatcggatgttgtcaattacatcaaagaagaaaatggacaggtttcctacaatgcggcagtggaagaacatatgaacaacgcagagtcagaaaatatgacagtaagcattgattcaaattcaggaaccggagatggaagggatgcatattttgcagatgccgcaaagcttttgatcgagaaagaaaaaggctcgatcggaatgctgcagcgttattttaaagttggatttaaccgggcagcaagaattatggatcagctcgaggaggccggcattgtcggcccggaagaaggtacaaaaccgcgccgcgttttaatgacgcaggagcagtttgaacaatatgaagaagagtatttataagacacgaggaggatcattatgaaaacagacattgagatcgcacaggaagcaaaaatgctgcacatccgtgaggttgcggaaaaacttggcattgcagaggatgaattagagctttacggtaaatataaggcaaaactctcagatgaactgattgagcgtgtaaaagatgagccggacggaaagttaatccttgtaacggcaatcaatccgactccggcaggagagggaaagaccacgatcagtgtcggacttggtgaggcatttggacagcttgggaaaaaagcagtaattgcacttcgtgagccgtcccttggaccgtgttttggaattaaaggcggcgctgcaggaggcggttatgcacaggttgttccgatggaggatttgaaccttcattttaccggagatttccacgcaattacttctgcaaacaatttacttgccgctttacttgataatcacatccagcagggaaatgaacttggcattgatccaagacaggttgtctggaaacgttgtctggatatgaatgaccgtgtcctccgaaatattgtggttggacttggcagaaaaatggatggaatggtcagggaagatcattttgtaattactgttgcatcagagatcatggctgttttatgtctttcagacgatatgcatgatttaaaacgcagacttggaaagatcattgttgcatatacttatgatggaaagcctgttaccgctgatgatatcaaagcaaccggtgcgatggctgcattgttaaaagatgctttgaaaccaaatctcattcagactttagaacatacaccggcaatcgttcacggcggaccatttgcaaatattgcacatggctgcaacagtgtccgtgctacaaagacagccttaaaacttgctgattatgtgatcacagaggctggttttggcgccgacttaggtgctgagaagtttttcgatatcaaatcccgtatggcaggacttcacccggatgccgttgttttagttgcaactgtccgtgcattaaaatataatggtggtgttgcaaaagccgatcttggagaggaaaatttagaggctttaaagaaaggtatcgtaaaccttgaaaagcatattgaaaacctgcagaaatatggtgttccggttgttgtaacattaaattcatttgtaaccgataccaaggcagaaaccgattatatcgaacagttctgccgtgagagagactgtgaatttgcacttgcgaaagtgtgggagaacggtggaaaaggtggagtggaacttgccgaaaaagtattaaagactttagaaacaaaagagagtcactttaagccattatatgcagatgatctgtcactggaggaaaaaatcgagacgattgcaaaagaaatctatggggctgacggtgtgacatatgcatctgccgcagcaaaggaattaaaacgtatcgcagacatgggaatgtcagatttcccggtatgtatggcgaaaacacagtattccctgtctgacgaccagacaaaacttggccgtccgagtggatttaccattaatgtgagagaagtttatgtttcagccggagccggatttgttgttgccattaccggtgcaatcatgacaatgccgggacttccgaaaaaccctgctgcatatggaattgatgttgacgataacggtgtgattaccggattattctaataagtcgaaagcgaggatatcccatgaaatgtgcgaagtgtggggcagagttaaaaaaaggctgcctttactgttctgtctgtggccacgaagcacagatagtttcggattacaacgtacttgaggatgattatctgcgttcacttctaaaagacggagaaggtgaaaaaaatccgcaggagaaggaaccggagccaaaaaaaacaaaaaagaagaaaaaaagtcatttggcacttattgtctgctgctgtcttatcataaccggtgcggctgttggcattgctgtaaaactttatatcgataataagaatgcaaattcctatgattatcagattgaaatggcagaaaaagagctggtggatcgtaattatgaaaatgcactgcgatattataagacggcactggcattgcagccggatgatatcaaagttcgtgaggcaatggcagagatctataccagccagaaagaatatgattcagcactcgttttatatatggaaatccttcaacttgacaaaacgaataaagaggcttatcagcatctgatctccatttatgatgaaatgggggattatgacagcattctttctttaaaagaagatgttacggatgagaatatacttgcattattcgatgattatgaggttggtgaaccgatcatatctccgcttagtgggcaatatgatgattatattacagtcgtgatctactcaattgccggaaatgacatttattatacgacggatggcactgttccggataaagaaaatgggattccatatccacagggaggtattccgttaaatcatactggaaattttgaaatcaatgctgtatgttgtaatgaaaaaggcatctacagtgatatcgtaacagaagaataccagattcagtttaaaaaaccggatctgccatctgtctcaccagatggaggagttttctctgaggagaccactgtaacaatcacacagcagaaagattgcacgatttattatacatgggattctacagatccaacaacagaatcggctgtttatacagaaccgattgttgttccggaaggggattatgtattatctgtcatggcagtaaataacaagacaggtttagtcagtgatatctatcgtgtaaatttgggatatcatccgtaaggaaacagctaagaaaacattgcatgaaaaaagtcagccacaaacatgtgactgacttttttcatgcttttaatgtacaccaaaggcatatatttattcttcttcaggaataaattcgatcagatcttttccaagtttactgatgcgggcgagagagtatacatcaatgccctgttccattaattttccgcgtcccggctggaatgatttttcaatcaggataccgactccggcgatcgttgcatgtgctttgcgcagcaagcggattgctcctgttgcagcttcgccgtttgcaagaaaatcatccacgatcaatacatggtcattttcattgataaactgctgggataatgtcagctcatagcttgtccctttggtaaaagaagtgattactgtctggtacagattatcatttaacacctttgaaggctgtttctttaaaatgatcattggaacattcagcgctaacgctgtcataagagcaggagcgataccggaactctcgatcgttacgaccttcgttactccacaatctttatagtgtgcggcaaatgcttcaccgatctgatgcattaaaacaggatcaacctgatggtttacaaaactgtctacctttaaaatatcttcattgactgcaattccttccgaaagaatcttctcttcaagtattttcacaatagccacctcataaattcaaatattttacctattatatcacatatatctgacagaaaaaagtattaagccaaaaatattttatcataaatcgtttcgataatgtgatctaagagggaggcatctgtcttcggatatttttcaaggagcagactgcgcatgacctcatagcgcagaaaataattctgctcgtcagaatcgtctgaaatgccggcatcagcattgattgtttctgctgtgtaggtatctaaaaaccagtggcagatctcttcaaactgcttttcttcacgatcagctgcatttgaaagcgtttttaattccataaaggattttatgccgatgaaaaagaagatggcaaacataactcccatgacgataagaatcagtgttttcgtgtatgaagcactgtgaaaaggaagcagatccagtccaaacaagatcagaagaataaaaccggcaacgcttacgatggtgaatgtgtaggcggtagatgtgacgtcttctatttttgttttcttcgatacatacgcgtgagacggtgcgaaatcgctctcggctgtactgctaaaatcaaatggttcctgtgacatggttttcctcatttccagatgtatgaacatctattgtttttcaagtaattttagtataaattataatgtagatgcatgcaagcggatttgctagaatgactattaacagttcgctgcataattccggaaacaatataatttttatttaaaatgtgaggaactatgaaaattacaattttatgtgtcgggaagatcaaagaaaagttttacagggatgcgatcgcagagtacagcaaacgtttaagccgttactgtaaattagatattatagaggttgccgacgaaaagacgcccgaaaatgcaagtgataccgtagaaaatcagatcagggaaaaagaagccgagcgcattctgatgcgtctggataaggaggcaaaagagggcgcatatgtatttgcccttgcaatcgacggcagggaatttgattcggtggagttatcaaaaaagatagaaaatcttgggacttccggaatcagtcagatcgtgtttctgatcggcggatcactgggaatgtcggaaaacctgttaaaacgtgctgactgtaaactcagtttttcgaaaatgacatttccgcatcagctcatgcgtgtgatcctgttagaacaggtttaccgcagttaccggattatgaatggcgaaccgtatcataaataatgcagttcggcagacagaaatttgaatcaaacagtctgttgaggaatgctgcagaaggagaagagcgacatgagagtacaaaatccagttgtccgtggtttttatccggatccaagtatctgcagtgcaaacggcaaatattatcttgcctgcagttcatttgaatatttcccgggggttccattatttgaaagcgaagatctgctgaactggaaaccgatcggacattgtcttacaaggaaaagccaggtgaatctgtatcaggttcctggatcaggcggagtatttgcaccgacgctccggtttcatgacggacggttttatatggtcaccaacaacaatacctatcagaaaaatttttatgtctatacggacgatatctatggagaatggtcagaccctgtttttgtggatcagggaggcattgatccatctttatattttgagggagataaagtttattttatcagcaatggaactgacgaatcagatggaagatgctgtattttccagtgtgagatcgatatcgcaaccggaaaacgattgacggaaagcagaccgatctggaagggcagcggcggacgatacatcgaatccccgcacatgtatcatttcggtgattggtattatctgatggttgcagaaggtggtacggaatacggacatatggtgacttatgcaagatcgaaagatccttacggaccatttgaggcgtatgcggagaatccggtacttacaaaccgaaatttaggcggcaatgaaaatcatatacaggggatcggtcatggtgatcttatcaccacaccttatggggaaacctttatggtatgtctgggattccggatccagagcgactggatgccgttccatcatttaggacgtgaggtatttttagttccggttacctgggataacgatggatggtttactgcaggtgtaaatggaaccgtggaatctgtgatggatatgccgttaaatgccacggcacaggaaataaacggacgttatgatgtttcttttgagacattaaaaaatgagccgcagcgtttttgtcatctgcgtgagtaccacaaggaatgttatgcatttgccaaaaacagtgtgacacttttgggcaatcgttttaccttaaatgatgcagaaacaccaacatttttaggcgtccgccagtcggagtttgacacagaacttaccgtcggactttccgggaattcgccggaagcgggtatcacattttatctgtccgaggaacatcattatgatctggctgttttatgtgatgagaagaagcgcacattgatcttacgtctgcgcatcggggatgcgattatggtggtaaaagaaatagaactgccggatgatgcagaggttaccttaaaagtggtatccgatccggcgcagtatcatttttatggcgtggtggacggaaaagaaattctgcttggaagcgcacgtacaaaatacttatcttctgaagttgcaggaggttttaccggtgttgtgatgggaatgtatgcggtaaacccggagaaagatgaagatcgtaaggccctgtttatgaatttatgctggaaacaggggacaagcagaggttaaagcgtaaatcttagtgttttatcatgaaaaaaacagggattacatgttattatagtatgtaatccccgttttttagatgtattcgatcgaaataaaataatcttttttaaaatctgttatacactctcaaactcatcaacgatctcctgtgaaggtggtgcagtcaaaagactgacaacaacgatcgcagatgcagaacataaaaatgccggaagcagttcataaattccaaacaggcctccaagtgaggcaatcagatatttccatataaataccataacgccaccgacaatcattccggcaagtgcaccatttcgattggtacgtttccagaataatgaaaacagcatgacagcaccaaaagtcgcaccaaatcctgcccaggcgaaagatacgatgcggaatacagaactgtttgggttcctggcaatgaaaaaaccgataatggcgatcacaacaactgtaagtcttgccataagcatggaagattttttggaaagctttaatcccatgcaatcacagaacaggttttgtgaaacacatgaggatgcagccaaaagctgtgaatccgaagttgacatggtacttgcaaggattccggcaagaataagtccagccatgataacggataaaacaccgtgattacttaaaaggacagctgttctgacaatcagtgtctcagactgagccgaattctcaaataacgcaagggcaccggctttggtcattgcagaaccgataataccgataaaaatggcaacaaacatggaaataacaacccatacggatgcaatccttctggaggtttttaatttgttctcatcctcgattcccataaaacgaagcaggatatgcggcatgccaaaatatccgagtccccatgcaagtgttgatgcaatggtaagacttttgtatggaacggatgcgccggctgcagggtcataggaagaaaaaagacttaaatatccgttcatggattttgcgttcgcaataacggcatcaaatcctccgacagtgtggataccgaaaattacaacgataaagagtgcaattgtcatgatgatactctgaatcagatccgtcatgcttgcggcaaggaatccaccaagagtggtgtacaaaacaatgacgatcgcgctgataatcattgccagaagataggaaacaccaaacagtgtagaaaacaatttaccacatgcagcaaaaccggaagcggtatacggcacaaagaaaatcacgatcataattgcagaaattgccatcagtgcatggcttttatcacggtatctgttttcgaaaaaagccggcagcgtgatggaattgtttgctttgtgggtataacggcgcaagcgttttgcaacgatcagccagttgagataggtaccgattgcaagcccgatcgcagtccagccggcctcagcacaaccggaaagatacgcaacaccgggcagtcccatcaaaagccagctgctcatgtcagatgcttccgcactcattgcagttacaatcggcccgagtttacggccacccagataaaaatcagaaacatcattgttctttttggaatagagtacaccaatgccaaccatcaggatcagataaatgatcatgacgagaagcagtcctattgtctgtcctgtcataacaaaactctcctttgtctgttcatataaatttttgcaagtatatcatgaatgaaacattactgcaatactgtatcacaataaagttgtaatgtaaaatattttttattgacatagcgcgaaagatatgatattttacagaaaaaagtatgaaacgggaatgaggttctcccacgattaattcgaaaccgctaaatttagctgatgacttctgtgtagactgcacgggggtatcagctttttttgtgatttcgaaaaataatcagataaagaaaggatgtttgtgcaaaaaaattgcacagcgaaggattaaacggatggaaaacaaatcacaaacgattgttttatctctgaaatatgtattgcctgccattttaaccggtgtactggttggaatcattgatacagtatttggcagaggactactgacaatttctgattttcggacaggccattatttgtatctgataccgtttctgccgtttgctggtcttttgatcacatggctgtatcatcatttcagcgagacaagcttaaaggggatgacattagtatttgagacgggacagaaaaaaagagaggatattccgttgttgttaattcctctggtcatgtctggaacctggatcacgcatttattcggaggaagtgccggccgcgaaggcgtcgccgtgcagatcggtgcagcgttatcacatgcacttgggcgcagatttcatcttccaaaagacagccgcgttatgctgatcaccggtatggcggcggggttcggtggtttgtttcagacgccgcttacagccgtatttttttccatggaagtgatcgttgcagggaaaatacagtatgaagcactgctgccggcactgattgcttcatatacagctgcttatacttcccatacactggggctggaaaaattttatgtgccgcttaaggatacacttgagatatcagatgctggtatggctgtccggctcattgtgcttggaatcatttttggactgaccggacggctgttttcgtttctgcttgcaaaatcaaaaaagtttttcggagaaaaaatcaaaaatccatatttcaggataggtgttatttccatcccgttagcactgattttgtttctgctttacaacggaagatacagcggacttggaaccaatctgatctcggcagcattttctggcggaatgatttattcttatgactggatcttaaaactgctgctgacaattttaactcttgcaatcggatatcagggtggggaggttacaccgttattttccattggtgcatcgcttggaattgttttagggggaattctttccatttcgccggttcactgtgcggcactcggatacgcagctgtatttgcaggtgcaacgaacacactgcttgcgccggtgttgatcggacttgaagtatttggagcaaatgatatggtgccgtttctgatcgtatgcatttttgcttatctggtgaacggggataaatctatttatggagcgcaggaagtgagaaagtaattttgaccagtattgctttcattgtttcaggtaaggttttatgatagaatatcaggtatcacaagcttggtgcctgcgctaaaacttgtgatacctgaaaacagacaagaataacgcttaaaataaatgtgtttaagggaatatattttgtaataagacaataaggaagtgaggctaaccatgagaaagaaagaacttgccaaagaagtgatcgagcgtctgaaaaaagaatacccggatgccggatgcagtctcgaatatgaccaggcgtggaaacttctggtcagtgtccgcttggcggcacagtgtaccgatgcaagggtaaatatcgttgtagaaaaattatatgaaaaatttccggatgtgaaagcacttgccgaagcaccggtggaagaaattgaagaaattgtaagaccgtgcggacttggaaaaagcaaggcacgggatatcagtgcatgtatgaagattttatgggagcagtacggtggaaatgtgccggaagattttgactcccttttaaaacttccgggtgtgggaagaaagagtgcgaacctgatcatgggagatgtctttggaaaacctgcaatcgtaactgacacacactgtatccgccttgcaaaccgtattggtcttgtcgatggaatcaaagaacccaaaaaagtagagatggcactctggaagatcattccgccggaggaagggaatgatctgtgtcaccgttttgtgtatcatggacgtgaagtatgtacggcgcggacaaaaccgtattgtgaccgctgttgtctgaacgatgtctgtaaaaagacgggagtggagtaaaaaatattggaaattccagattttaccggttggatggcagtataaattatgatattcttctgcttgtaacaattatgtaatatatttgaaatggataagaaatatttaaactgttacataatgcaaaattacaaatggaggaatatcatgaagaaacagacaatactggcatttacaacggcacttggaattgcgatgagcgtatctgcaccggtagaggcagcgtccgctaaccgtgtgaacatctcagtttatgagaaggactgcacaacaaatcagtggaactctgttgagacaggttctatcaatgatgtattgaaaaaaatatgtgatcgttttccggcaatcgttttaccgggagactgcataccggaaattccagaagacgacaaagaagagcagacaccggatacatcagaaaaacctgatacgtcagagaaaccagacacatcggaaaagccgggtacaccagaaaaaccagacacatcagaaaagccggaagaaagtcagccgggcggtactgaatcaggtgggaacagtactacagacagtgaacagccgaaagatgatgtaacggaaaattcctatgcaaaacaggttttaaaactggtcaacacagagcggaaaaaggccggcttaacggaacttacatgggatgatacagttgcgactgccgcaatgacacgttcaaaagaaattgaaaaatcattttcccataccagaccggatggaagaaattttggaacggcgatcacagatcttggtatcacttatcgcggagccggggaaaatatcgcatggggtcagaaaacaccggaagcggttatgaatgcatggatgaacagtgaagggcaccgtgcgaatatcttaaacccgaactttaagaagcttggtgtcggttaccgtacagatagtcagagaacgccgtactggacgcagttgtttacttattagaaaagaataagagttatttagagaatgggcatattgcaaatgagagtttgcgtaatatgtccatttttttgcgggaaaccacagttttccagaaaaagtccttggttttccgggaaaagtccttggttttcccttattcccgtttgacggcagtacttctgtacagtataatataaatagcacccttttatgcgtacacacaggaggaatcaatgttaacgatcaatgaataccgcaaggtagaaagtttagaagaagcgtatgagctgaatcagaaaaagaataataagatcatcgcaggcggtgtctggatgaagatcggtgaccggagaattgcgacggcaatcgatctgtcagggcttgggctggatcagatcaccgagacggatacagagtttgtcatcggtgccatgacaacactgcgtgagatagaaaaacatgcgggacttgccgcatatacagacggagccatccgtgaaagtgtccgccatattgtcggtgtacagttccgcaactgtgcaaccgtaggtggaagtattttcggacgttttggtttttccgatgtactgaccgtatttctggcaatggatacccaggtagagctttatcatgcaggtatggtttccttaaaagaatttattgatatgccatatgataatgatattttagtagctctgcatgtggcaaaaaagccgatccgcattgcctatttaagccagcgcaatacggctaccgattttccggtggttgcctgtgcagtgtctgaatatgatggcagtctgcatgtgagtatcggagcaagaccggttcatgccagattggtagagctgccgctcggttccggtgaaccggatagttttggaaagcagcttccggaaggatttgaaaaagatgaggcactggtaaaggaacttgcaacctggtgcgcagatcagtttacttatggcagcaaccgcagagctggagctgattacagagaacatgttgctggcgtgctgatccgcagagcaatctgttctttggaaaaataaaagacaggcattggtgtaaaaaggtatgaaagtctttgcttataaaaagacaatatcagaaatggagaacgaacaataagatgaaaatacatgtatggctgaatgagcgtgaaatcacacgcgagatagcagcagatctgccgctgttagaatttgtccggtcagagggctgttacagtgtaaaaagaggatgtgagacctcaaattgcggtctctgtaccgtgtggattgaccacaaaccggtgctttcctgttccgtgttagcggcaagggcagacggtacacatatcacaaccttagagggagtggaagatcgtgcaaaagaatttggcacttatctcgcaaaacagggcggcgagcagtgcggcttctgcaatccgggatttatcatgaatgtacttgcgatggaggatgagttggaaaacccgacggaggaggatatgaaggaatatcttgccggaaatctttgcagatgcagcggatatgagagccagcttcgtgcagtcaaagaatacctgaagtttaaaatggagggaaaagcatgaacagcagtacgaacttaagaaaaccgggaaaatttgtcaacgctcccgtaatgaaaaaagatgcgatggcgcttgtgaccggaaaaccggtttatatggatgatgtggcgccaaaggactgtctggtcgtaaaagttctgagaagtccgcatgcgcatgcactgatcaaggagatccgcacagaccttgcagaaaaagtagacggtattgtctgtgtactgacctacaaagatgttccaaaacgccgctttaccatggcaggacagacttatccggagccgagtccgtatgaccgttatatattagaagatcgtgtccgctttgtcggcgatccggttgcgatcgttgccggagagaccgaaaaagcagtcgatatggcattaaaacggatcaaagtgacttatgaggttttagatgctgtattagatttccatacagcaatggataatccggttttagtacatccggaggatgactggaagtcactctgcccggtgggtgcggacaacaaaaggaacctctgtgcgtccggtgtggacggagagggtgatgtggatgccgtgattgcggactgtgatatcgtattagacgaaacttaccatgtcaaagccatgcagcagagcatgatggaaactttccgtacctgtacctatctggatacctatggccgtctgatcgtgctcagttccacgcagatcccgttccatgtgcggagaatcgttgcaaatgcactcgatatttccaaggcaaaagtgcgtgtcatcaaaccgcgtatcggtggaggtttcggtgcaaaacagacggttgtgacggaagtatatccggcgatcgtaacatggaagaccggaaaacctgcaaaaatgatctacaccagggaggaatccatgatcgcatcctcaccgcgccacgagatggaagtccgtgtacgtcttggcgcaatgtcggatggaacgatccgtgccatcgacctgcacacactttcaaatacaggggcgtttggtgaacatggtccgactacggtgggattaagcggccacaaatccatcccgatgtaccacacggaggcattccgttttcagtatgaggtagtctatacaaaccggatgtccgcaggcgcttaccgcggttacggtgccacacagggtatttttgcggtggagtccacagtcaataaattggcagacagactttccatggatccgatcgtgcttcgccagaagaatatgatccatgagggcgatgtgatgccagcttattatggcgagaccgcgaatagctgccgcttagaggaatgtctgctaaaggcttctgatatgatcggatggaaagaaaaaggcatgcgcactgtcatgccggatggaaagatccgtgcacgcggcgttgccatggcaatgcagggatcttccatttccaactgtgacgtcggttctgtcacggtaaaattaagtgatgaaggaacttatcatatcacggtcggctgtaccgatatgggaacagggtgcgatacgatcattgcccagtttgcggcggatgtgttagagacaccgatcgataatatttccgtgtacggtgttgatacagatatttccccatatgattccggttcttatgcgtccagtacgacctatctgaccggaatggcagcagtgaaggcgtgtgaacagctgcgtgaacgcatcatcgcgcttgcagcagtacgcatgaacaaagatgcctcggcactcacttttgacggagaaaatgtcatcgatgagtcggacggcgcaaaaatgagtctgtttgatattgcaactgcatccatgtgcaacaatgagatctcactggaagtaacatactcacacagctctccggtatcaccgccaccatttatggcggcgtgtgcggagatcgaagcagacccggaaacaggtgctatcgagttattggattacaccgcctgtgtggattgtggaacggttgtaaacaccaaccttgcaagggtacagactgagggtggtcttttacagggaatcggtatgacactgtatgaagatatctggtacgatgagagaggaaagaatctttctaactccttcatgcagtataaagtgccaagccgtttagataccgaccgcatccgtgtggaatttgacagcagctatgagccgaccggtcctttcggtgcaaaatcgatcggtgagatcgtcatcaacacgccggctccggcaatcgcagatgcagtttacaatgcgaccggtgtctggatcaatgaactgccgatcacacctgagaaaatcctgaagggaatgaaggtgatctgatacgatacagataaatctgatctatcttgctgccggatacgcaaggcggttcggcagcaataaactgcttacggaatttcatggaaaaccgctgttcctgcatggcctgacggaattagtgcgcctgcagaatatgtgcagttatccgtgtaagatcattgttgtgactgcatacgatgaaattgagcagttgtgtaaagaattgtctgcaatcgactgcatcgtcgtgcgcaatcaaggtacgcaaaacgacggaattgcctcaagcattcgaaaaggcatagagacatctgtcacttatcccgtgacagcaacgggtggttctgtttcctatgatatgttttttcaggcagaccagccgtatgtaaaagcagaattactccttgactttctggatgcattttttcacagcaaaaaagggatcggagctttagcgtgtgacggcagtctgcgcagccccaatcttttttcggaaacttatcgcggggaactgcttgcactgaccggggagtgcggcggtaaaatagtgatccgttcccacccggatgatgttttctcttatccggttttaatgccggaattttttgttgatatcgatacaagggaggattatgcacatgagaatgtatgacctgattgaaaagaaaaaacttggcatggaactgaccacagatgagatccgttttatgatcgatggttttacggacggtacgattccggattatcagatgtctgccatgacgatggcgatctgttttcagggaatgagtaaacgggaaacggtcgacctgacacttgccatgcgtgacagcggggatgtgctcgatctctcttccattccgggtgtgaaagtagataaacacagtaccggcggtgtgggagataagacatcgttagcgctgacaccgatcattgcttctcttggagttccggttgcaaagatgtctggaagaggacttggccataccggaggaaccattgacaaacttgagagctttccgggatttacgactgcgcttccggaggaaatcttttttaaaaatgtccgtgagatcggtattgcactggcagggcagacggccaatcttgccccggcagataaaaagctgtacgcactgcgtgatgtcacggctaccgtcgatcagatgtcactgattgccagctcgattatgagcaaaaaattagcttccggcagtgatgcaatcgtgctcgacgtcaagaccggaaacggcgcatttatgaaaaaatatgaggactctgtcgcacttgcaaaagagatggtgtcgatcggaacgatggcaggcaaaaagacggcggcagtcatcacggatatggaccagccgcttggaaatgccgttggaaatgccatcgaagtgatcgaggcggtcgacaccttaaaaggagaaggcccttcggattttaaagaggtagtctttgcactgggggcccagatgttactctttgcaggacgtgcagattcatgcgaagaggcggtaaaacccatgcaggattccatagacagtggagctgcgcttgataaaatggctgagtttgtgagagcgcagggtggggatgcatcttatgtatatgacacttcaaagttcccaaaaacaaaatattcggtcgaagtaaaagcagcgtgcggcggattcgtgcatcgcattctggcggaaaatattggcattgcctgtatgacacttggcggtggacgtgaaacgaaggacagtgtgatcgatctttctgttggcatttatttaaagaagaaaaatggagatgctgtagataccggtgacacactggcagtcatttatgcaaatgatcgtgaaaaaatggatgcggctgccgaaaaagtactgcatgcttatgaaattgctgccgtgccgaaagaaatgctgccggtcgtaagagaatatatttacgaataaagaataagatctttttttccttcatacaatcatatatgaagaaaaatcagaaagaaaaaataataaacagcttagaactgccgaaggatctgatgctcggcgcagcgatcgtgactgcaaccggaaggcatgaggttctgatttctaattataaaggaatcctggaatatgaggattcctttatcaaaatacagacaaaaaactgcaggatcctgatttccggctcacatcttgcaatcgactattacacgaatgaggaaatgaaaattaccgggtttttagacacgatccagtacgaaaattaacagatgctgctctcggtaattaagtattttaaaggatacgtgtatgtccgtttaagcggttatgcgccggaacgtttcctgaatttatgcggaagccatgatattctgatctggaatttgaaatctacgaaggatggatacgaattctgcatcagtgtagcaggttttaagcagttacgtccgatcttaaaaaaaacaagaacacacatccgcatccaaaaaagatatggcatgccgtttgaattgtaccattaccgcaaacggaaaatgtttgccatgggcatgctgttatttgcagggctgatctattacctttccggttttatctggaatattgaagtcaacggcaattcctatctgtctgaggaagtcgtactctgctttctttcgaaagaacatgcctcttttggcacaaagaaaaaaaatattgactgtgcggctttagaggaaacgttaagaagccgttatcccgaagtgatctggacttccatcaaaatctacggcaccaaaatgacggttgatatccaggaaaatctgctcccggaagaaaattatgaggaaaagaaagaggagacagcgcacgatatcgttgctgctgatgatggcttgatcacagaaatgatcacaagaagtggtacaccggtagtgactgtaggaaccccggtgaaaaagggagatgtgttagtcaatgggtatgttgagattctaaatgatgacggagagacggcacaatatctttaccgcaccgcagatgcggatgtcattgcaaaagttacatattcctaccatgacgagataccgatggaatatgtaaaaaaagtgccgaccggcgcagaaaaaataacttatcaggtcagaattctggattatctgatcgaaaatccttttttttcaccggtggaagaaccatatgaagttgtgtcggatgtgtcacaatttcactttacagataatttttatcttccggtttatctggtcagacagacctgtgtgggctataaaaatgaacaaaagacgtacacagaaaaggaggcaaaacgactggcttctgagaatcttaagaaatatcttgacgatttggaagaaaaaggtattcaaattacagaaaaaaatgttattatagagagaacgaagaaaaaatatgtggtgaaaggaacgattggcactttaaaatccattgtttcctatcagccgacaaaaatcatcgaacaatcgagcgaagagaggcaaccgacggatgagtctgactgaactatcattaaatataccgactgatcatgtggccaatgtatttggtcagtttgatgcgtatatcaaaaaaattgaacgcaccttaaacgtcactgtggttttacgcggtgagagtatgaagctccttggagaggaacataatttaaaaaaagcggaacaggtatttttacagctgatcgaattatcaaaaagaggcaatatcattactgagcagaatgtcaattatgcactggcactttcggaggaggaaaaagaatccgcaatcgtggagatcgataaggactgtatctgccatacgatcaacggcaagccggtcaaaccaaagacacttggacagaaagcatatgtggatgcgatacgccagaaaatgatcgtgtttggcatgggtcctgcaggaaccggtaaaacttatcttgcaatggcaatggcgatcacggcgtttaagaatgaagaagtgggaaggatcatcctgacacgtccggcaatcgaagccggcgagaaattaggatttttgccgggggatttacagagtaaggtcgacccgtatttaagaccgctttatgatgcattatatcagatcatgggagcagaaagcttccagaaaaatatggaaaaggggctgatcgaggttgcaccgcttgcatacatgcgcggacgtacacttgacaacgcatttatcatattagatgaggcgcagaacactacaccggcgcagatgaaaatgttccttacccgtatcggttttggatctaaggcggtgatcaccggtgatgcaacccagaaggatttagcacctggcacagcatccggtcttgatgttgccttaaaagtattaaaaaaagtggatgagatcggcatctgtgaactgaccagcaaagatgtggtccgtcatccggttgtacagaagatcgtgaaggcttatgaagattatgaaaaccgcagtaagagcgcatcaaaaagaagacaggagactcgccagcgatgaatgaccgctttgtaatcaaaagaggatggaatcaggtctgcatgtttatcgttaccattgcagccatacttttactgtgtgcaaaacaacagattttactggatcagattttagggattgtctgtgttgccatgatatggtttgtattgtttcttttctttatagaacacgatcgtgcggaaggactgatcagccataaccgtgaaacagatttcaaaaaagtattatatagttatacggcagcagcggtggtggttgtgtttgcatcatactttcctggatttgtaaaaccgctggtatttgtaccgctcattattgcagcctttgtttccgaacgtcttgcgcttattaccggtattttctgggattccatgatatgtctggttatgggactgcattcacaggaactgatattgtactgtctgttgacaatctttggtgtgatccttgccgggacggcggaggaagccgcaaaacaggggaaaaaacttatctggtatgaagtgctgttgttctgcctctccgttttacttccagtcaccttttattatctgacctatcaggaggtacattttgtgcttttattatggggaattggagagggtgccatcagtgttttgtggctgcagtttggctatccgcatttctcacatttgagggaacaggaagtaaatgatatcctgacggatattatagatgatacttatcctcttgtccgtgaactgtcaaatttttcgaaacaggaatatcagcatgcacgcagagtttcaagacttgcagcaagctgtgcgagagttgccggggcagatgaaaagacctgcgcggcggcaggattttattaccggatcgggatcatggaaggtgaaccgctcacagagagcggaatccgcattgcacaggaacactgttttccggaagatgtcatccgtatcatcagtgaatatgatggcgaaacagcaccgccttcatccatcgagtccgcgatcgtacatatggtaaatggcctggtcaaaaagatagaagtttttgacagttatacaatggcaagcgaatggaatcaggatatggtcatctaccagacactaaacgaatattctgcaagcggaatttatgatcagtccgggctcggcatgaatatgtttttaaagatcagggaatatcttgtaaatgaagaaaccttcttcttttaaaaaacgtataaaatacaaaagatataaaaactgcctgtaaggcacagaaatgaggaaatttatgagtctttttatagaaaaagaaacagatactgatttttcatttgatgaggaggcactcgcaaaagaagtgacagactatgcaatcgagcatgagggatttccgtttgaagctgaaatcaatctgacgctcacggacaatgatggaatccacgccatcaataaagaataccgtgacattgatgcgccgacggacgttttgtcatttccgatgctttcttatgagagcgcaggagatttttcgaaattagaagatgattacgatgacaatttcaacccggacacaggcgaaataatgctcggtgatatcattatctctgttgacaaagtaaaggaacaggcaaaaagttatgggcacagtgaaaaacgtgaatatgcatttttaatccttcacagtatgcttcatttatttggatatgaccatatgacaccggaggaagctgccattatggagggaaaacaaactgagatcttaaacgagatgaacattttaagataacgaggattaagtcatatgggcaaacaaaataaaaaaagcagtacaagttttcttgtgcagggttctattcttgctatcgcatccatcgtcagccgtattatcggtctgatctaccgtatcccgctgacaaatattatcggggataccggaaatgactactatggaactgctttccagatttataatatattattgatcatttcatcctacagtctgccgctcgcagtatcaaaacttgtatctgcaaattattcacagggcagaagacacaatgtataccgcattttaaaatgtgcattgatcttcggtgtatgtaccggtacggtcgccgcactgatccttttgtttggtgctgagtttatcacaggcacgctgatgaaaacaccgatgagcgtcttcgctgtgcgtgtactgatccctgtacttctgattgttgcagtacttggtgttatgagaggattttttcagggacttggaacaatgatgccgagtgcaacttcccagatcttagagcagattgcaaatgcaatcgtcagtgtatgggcagcgtatgtattggctgattatggtgcaaaggctggagcactgcttggtgatgctgataattattccgcagcatacggagcagcaggaggaacgcttggtactgcgatcggagcactggttgcattattattctgtacctttgtactggttgtatatctgtgtgcgttcaaacgcagtctgcacagagagcggaaaagaaacgttgattcctatggctcgatatttcatctgcttatcataacgatcatcccggttttactgagcagtacgatctacaactgcaataccgtcatagatcaggctgtatataaacacattgctgcatatcagggatataccgcgaaccagtatggttcctggaatggtatttatactggaaaatatacggttctgatcaatgttccgatctccattgcatcagcgatggcggcatcctctgttcctgcactgactgctgcctatgcagccgggaaaaaaggcgaagcaaaacgacagatcgggattgcaacacgttttatcatggtgattgcttttccatgtgcagttggcatgggcatacttgcatcaccgatcttacagcttttgttccgcgattcatcggagactgctgcacatatgttacaggtaggagctgttacgattttgtttttttcactgtcaacgctttcaaacggtcttttacagggaatcggccgcatgaaagaaccgatcaaaaatgcgatcattgcactggtactgcatttaggactgctggcagcacttatgttcttgtttgacttaaacatttttgcagtcgttatcgcaaatgcagcattcggtcttatcatgtgtattttaaatgcaggatcaatccgccgttacagcggatatcatcaggaaattcgaaaaacattttttgtccctgcaatcgccgctgccggtatgggtgttgttgtatggctcgtctatcatggcattctgtacgtgctgcgtgttaatgctgtagcaacgcttttgtcgatcgtgattggagcggcggtatatgcagtgttactgttgctgttaaaaggattaaatgagcaggaaatcttgcgtttcccgaaaggccgcatgctggcagatgtcgcaaaaaaaatgcacttattaaaatagctgacggcatgtgtttagacattctatgaccatgaaaaaatatttctgacaagtgaataaaaagtaaaatttggcaaatacttatcgtaaaaccggaatatggagtgatgggatgaaaaaaacgacgagtatttgcctttttaccggaatgatctttcttttattggtcatggttgtttatttactgtttacacaacaggatacgggggaaaaagaacaggatcttgctgcggcaaccgaagaaatgccggcagaaacggatacagaaaaagaacttaagacaacagagagtcttgctgtttatgaatcatatgcatatgttataaaacagaaggacgggatattggtcgtataccagagtgatgggatcacagaattttttgagacaaatatccgcatccgtgatctgaatgaagatatggtaaaaaaattggaaaatgggatccggttttcggacgatcaggaattgtacgcctttttggagagctattccagttagattactgcagcctttctgatattgatgaattaccagcaataactatgggtttcacggattgaatgtttgttttttgtatgttaaaataatcaatggtttatcctgttacggacaaataaactatataaatatcgaaaaaggtttttaatatgacagaaacagaagttgcagtcattggcggcggagcatccgggctgatggcttctattgcgtctgctttagcaggtgcagatacaatcatcttagaacatatggaccgtgtaggtaagaaaatacttgccacggggaatggaaaatgtaattatacaaacgaggtgcagggattatcgtgttacagaggcgaaaaccctgcttttgctgtaccggtattcagacagttcgatcagaaaaaaacagtggcgttttttcgtgagatcggtatcgaaccaaaaataaaaaacggctattattacccggcaagtgaacaggctgcttctgttctggatgtccttcgcatggaagccgcatataccggtgtaaaggagattgtctcctgtgagatcaaagcaataaaaagacagggggatttctttctgatccggacaggcacaggagattttcgcgcaaaatcaatcatttttgcaaccggtctttttgcttcgccgaagagtgggagtgacggcagtgcgcttccatatattgaacactttgggcaccatatcatagatattgtaccggcgttggtgccgttgcagtgcaggcagtcattctttaaaatgcttgcaggaatccgtgcagaagtttcgataagactgtacataaacggagcagaaacgaccagagaacgtggtgaattacagctgacggattatggaatatcgggaattccggtttttcagatcagccgatatgcaaccagagctttaaaacagaaaaaacaggtatatgcacagatcgattttatgccggaccggtcttttggggaagtgaatgatctgctgaaactgcgtttttgcatgaatgctcacggaaaagatgcctctcaggcgatgatcggtctctgcaataaaaagcttgcagaggtactcttaaaagaagccgggattgatcttcatattccgtcaaaaaaagtaccggaaaaacaattgacacgtctgacaaaactgctgaaagacctgcgtgtcgacatcacaggaagcaaagatatcgcgcaggcacaggtctgtgcgggcggtgtggacacacgcgagatcgatgcagccagcatgatgtcaaaattaattccgggactgtttttcgcaggagaagtcgttgatattgatggtatctgcggtggatataatctgcaatgggcttggtccagcggatatgtggcagggagccatgcaggagaatatgcacatccgggaaaaaaagcgcacaggaagaaacgaggaaattatgattcgaattaatcagatcaagctgccagtaacacatgatacggtgcagttagagcaaaagatcaaaaaagcgttgaaattaaaggcggacacgccttttcaataccagatcgtcaaaaaatccattgacgcaaggaagaagccggatctgttttatgtgtactccgtagatgtagagacgtcagacgaccagaaaattttaaaaaaggttaacaataataatgttatgtcaatcaaagtaaaaaaatacgtccttccggaagtcataaatccttcacgcacacctgtgatcgcgggggcaggccctgccggactgttctgtgcctatgcattaatgtcagagggttttcatccgatcgtgacagagcgtggtaaaaaggtcgaagaacggactgcggatgtgcagaagttctgggagaccggtgtcttagacaccgcctcgaacgtccagttcggagagggcggtgcaggaaccttttccgatggaaaattaaatacattggtcaaagatcccattggaaggaaccgttttgttcttgaaacattcgtaaaatttggggcaccggaacatattttatatgaaaacaaaccacatatcggcacagatattcttgcagatgtgataaaacggatgcgggaatttatgacagaaaatggcgtagagtttttatttgagacctgtgttaccggattttccaccggcaaaaacgggaacttaaaatctatcgaattaaatcacgacagacagatcgataccgactgcctgatccttgccatcggtcacagtgcaagggatacgttttcgctgttacaggaaaagggcttaaatatgcaggcaaaatcctttgcggtcggattccgtgtggagcatccgcagagcgaggtcaatctgacacagtacggagatttatatgcagacaaacttcctgcggcaccttataaagtgacggcaaatcttccctccggcagaggggtatactccttttgcatgtgtccgggcggttatgtcgtaaacgcttcctccgaagaacaccgccttgcagtcaacggcatgagttactcggaccgtggcggcagcaacgcaaacagtgcgatcatcgtctccgtcacaccggaagattttaaggcggatgcgatccgtcatggtgttttaaaagatgccgatgggaaagaagatgtactgtccggcgtccgttttcaggaacgtctggaggagcgggcatggaaacttggaaatggaaagatcccacagcagttgtttggtgattactgtaaaaatcgtccttccgtttcctacggtgcatttgagagtacaacaaagggtgattccgtactttgtaatttgagaggacttctgccggaagaattagaggaatcattcatagaaggaatgcatcatttttcccgtgcgattccggaatttgaccgtgaggatgcgatcctttccggtgtcgaaagccgtacatcttccccggtgcgtatcgtgcgtgatgaatcattccagtcgaatatccgcggcatttacccatgcggggaaggcgccggatatgcaggtggtatcatgtctgcggcaatggacggcttaaaggttgccgaggcaatcggtagatatgccatagagagtaaatgatagattacaattatgaaaaaaatagatgatccatttgacggacgctattatgatgaatagaaaaagaacagaggttaaagacgtggcagaatatacacctatgatgcagcaatatttaaaaacaaaagaggaatataaagattgcattttgttttacagactcggtgatttttatgagatgttttttgatgatgcgatcgttgtctcaaaagaacttgaactgacgctgaccggcaaaagctgtggtgcagaggaacgcgcgccgatgtgcggtgttccttatcatgcagtggaaggatacttaaataaactggttgcaaacggtcataaagttgcgatctgtgagcaggtggaggatccaaaacttgcaaaaggtcttgtaaagcgtgaggtgatccgcatcgtcacaccgggaacaaacacagacatgcaggctctcgacgaatccaaaaataattacattatgtgtatcgtatatcttgcagataaatacggtatttcattagcggacatctcgaccggagactattttgttacagaggtcgatacggagcggaaactgattgacgagatcaacaaatttgcaccatccgagatcatctgcaatgagagcttttatatgagcggtgtcgatctctctgatatgaaaaatcgccttggtattgcagtgtactctttagaggcatggtatttcagtgacgagacggcagaaaatacgttaaaagaacattttaaggtgcagagtcttgaggggcttggattatctgattatgcgtgcggcacgatcgctgcgggggcattgctccgctatctgtatgaaacacagaaaaatgatcttggcaatctttctgcgattcatccatactcaaccgggaaatatatgatcatagacagttcgaccagacgtaatttagagctggtggagacactgcgtgaaaagcaaaaacgcggttcactgctatgggtgttagataaaaccaaaacagcgatgggagcaaggacacttcgtgcttatgtggaacagccattgatcgataaaaccgagattgaactgcgccaggaagccattggtgagttaaacgatcatgtgatcacaagggaggaattgcgcgagtatttaaatccgatttatgaccttgagcgtctgatcacccgtgtgacttaccggacagccaatccgcgtgatctgatcgcatttaagaattctatcagcatgctgcctccgatcaaatccctgctcgatgagtttgacggtgcactgctaaaaaatatccagaacgacattgatgccatggaagaactctgctccctggtagatcgttcgatcatggaagaaccgccgatctctgtgcgcgagggcggactgatcaaggaaggttataatgaggatgtcgataaataccgcaatgccaaaacagagggtaagacctggcttgcagagttagaggcaaaagagcgcgaaaagaccggaattaaaaatttaaagatcaaatacaacaaagtgttcggttattatctggaagtgaccaattcctacaaggatctggtgccggattattttgccagaaaacagacacttgccaatgcggagcgttacatcacaccggaattaaaagaattagaagatatgatcttaggcgcggaggacaagctcgtcagcttagagtatgatctgttctgtgaagtacggaataaaattgcagaagaagttgtccgtatccagcggacagcgaaagcaatcgcaaacttagacgtttttgtatcacttgcagtcgttgcagaccagaataattactgcagaccaaagatgaccaacagtggagtgatcgatatcaagggcggcagacatccggttgtcgaaaaaatgatcacaaacgatatgttcatcgataacgatacatatttagataacggaaataaccgtattgcaatcataactggaccgaacatggcaggcaaatccacttacatgagacaggctgcattgatcgttctgatggcacagatcggaagttttgttccagcgacatcggcaaagatcggcatcgtggatcgtatttttacccgtgtcggggcatcggatgatcttgcaagcggtcagagtacctttatggtggagatgaacgaggtcgcaaatatcctgcgcaatgccacatccaattcgcttttagtactcgatgagatcggacgcggaacaagtacctttgacggtttaagtatcgcatgggcggtagttgaacatatcagcaacccgcgtctgctcggtgcaaagacactgtttgcgacacattatcacgagctgactgagctggaaggaaagttaaacaacgtccacaattactgtattgcggtcaaagaaaaaggcgatgacattgtatttctgcgcaagatcgtgcagggcggtgcggataagagctacggtatccaggttgcaaaacttgccggtgttccggattccgtgattgaacgcgccaaagaaatcgtggaagagctgagcgcaaatgatatcacgtctgtcacgaaaaacatcacgcctgcaacggcaggaacgaaaaagaaaaaagaacgtttggatgaagttgatttgacacagatgtctttatttgataccgtaaaggacgatgatattttagaagagttaaaaacgattgatgtcggaaatctgacaccaatcgaggcattaaacaaactttatgaattacagaataaaataaaaaaccgctggtagaaatggagaataaaatttatgggcacaattacaattttgccggagacaactaaaaacccgatcacgctgatgggacagcgcgccggtgtctgctggggaggaaatgtagaagatccggagaaaaattataaacggggcatggactgtatcatttccggacatggaagagtcatggaatatgtaaatgtagagatgatcattgccggctattccgcgagagtagagcgcgagtggtatacacatattggcggctcaccgacacgtttacagtcaagtacacgctatatcaattatgccggacgcggatttgattacatcatcccgccgtcgatccagaacaacaaagaagcattggaaaaatatcaggcattaatggcgcatatcaatgaagaatgccgcgctttgcaggaagactacgggattccaaaggaagatgttgcaaacggactgccgcttggcatgacggcgtcgatcgtggataaaagaaatctgcgcagtttaacggagatgagccatcagagaatgtgtaaccgcgcatactgggaataccgccagttatttggtgacatccgaaaagcactttcggaatattcggaagaatggcgctggatcgcagataatctgtttatgccaaaatgtgattacttcggatactgctccgagacaagaccttgcgggaaaccggtgtccggcgttcctaagatgccaagaccataacagaataatgctgcaggaaatgcagcagaaacgattgaaacaaagaggtgaatctgtatgcctgaaattacactgctcagtcaggagacaattgacaagattgcagccggggaagttgtggaacgcccctcttccgtggtaaaagaactggtggaaaatgccatcgatgcaaaggcaactgccgtcacagttgagatcaaagagggcggtatttcatttatccgtatcacggacaatggctgcggcatcgagagggcgcaggttccgcttgcctttttgcgccattcgaccagcaagatcaaaagcgtggaagatctgatgagcattacctctttgggattccgcggtgaggcgctctcaagtatcgctgcagtttcacaggtcgagctgatcacaaaaacatacggggagctgaccggtacccgctatgttattgagggttcgaaagaaaaggaaaatgaggagatcggtgcgccggagggaaccacttttatcgtccgcaatcttttttacaatacaccggcgaggcgcaaatttttaaagaccgcgcagacggagggcaattatatcaatgacctgatggagcgtcttgccctgtcacatccgggggtttcctttaaatttatcaataacggtcagacgaaaatgcatacctccggcaattccagggaaaaagatatgatctatcatatctacggcagggatatcacctccgggcttttagagatcgaccataaaaatgagtattttcatgtcaagggttttatcggaaaaccgttaatttcccgcggaaaccgtaattttgagaattactttatcaacggacgttatatcaagagcgcgctgctctcaaagtcgattgaggaagcgtacaaaggctttctgatgcagcaccagtatccgttctgcgttctgtacttttccatggataccgatcttttagatgtcaacgtgcatccgacgaagatggaactccgtttttcaaacaatgaggcgatctataagacattgtttgaaattatccggggcgcactgacgcacaaagattttatccctgaagtaccggtgcaggaagaaaagatacggaaacgtgaaaacatcaagacaccgctcccggaaccgtttgagcgccggggtgttgaaacggtgcggagtggaggaaggtttcagccgcaggacatacagcagggaacaggcggacagtccggtttcgctgcgtcaaaagaaaatgaagacgtgcagacaacaattccgatgcagagcgcagcaccgcagaaggaatcagcaccgccggaaaacctttctgtctttaactcgcttcttccaaagaaagaaactgctgtcacagaacagtccgcggaccgggtatcggaaagcaatacatacaccgtttccaaacccgtaccgcagccaatacaggcggataaaacaacggcaagcctgccagaagagacagcggcagctttaccggagtcaaaagtcacttacgagcaacagaaacttgcggcagtctccgaagggtttctgacaaaagatgccaagaagaaacacaagatcatcggacagctgttcgatacttactggatggtagagtatgaggacaagctgttcatcatcgaccagcatgcagcgcatgaaaaagtactttatgagaaaacgatgaaaaaagtgcgtgaaaaaacattttcatcgcagacgctcagtccgccgatcatcctgacactcagcattgaagagatcgagatgcttgaaaaatacagggagcagatcgatgcgttcggctatgaaatcgaaccgttcggcggaaaggaatatgcagtgactgctattccggctgattttaccgggattgacacaaaaacaatgtttcttgaaatgttagatgattttgcaaatataaatgaaaatgattcaccaaatgccattatggaaaaagttgcgtcgatgtcctgtaaggcagctatcaagggaaaccagcacatcagcaggccggaggcagaacggctgatcgatgaactgttggagcttgaaaatccgtacaactgcccgcacggacgcccgacgatcatttccatgaccaaatatgaaatagaaaagaaatttaaaaggattgtctgatatgcagcaaaaaccaatgattattctgaccggtccgaccgcggtggggaaaagtgccctctcggtggaactggcaaaaaaaataaatggagcggtgatctctgcggattctatgcaggtctaccgccatatggatatcggttctgccaagatcacaccggaggagatgcagggtgttacgcattatatgatcgatgagctagagccggacgaagaatttcacgttgtgcgttttgtcacgatggcaaaagaatatttaaaagaaatctatgcggatggaaaaatcccgatcatagccgggggcaccggattttacattcaggcacttttgtatgatattgattttacagagcagcagtgtgatgagacttaccgcaggcagttagaagatcttgccagagaacatggcgcagaatatctgcacggaatactgcgcgaagtggatccagcttccgccgaagcgatccatgccaataatatcaaacgtgtgataagggcgttagaattttatcatttatccggcaaaaaaatatctgagcacaacgaaacggaacgacaaaaacagtctccatacaattttgcctattttgtactcacggatgagcgtgcaaaattgtacgaacgcattgacagacgcgtggatgcaatgatagaagccggacttgtggaggaagtaaaaaaattaaaatccatgggctgcagccgggagatggtttccatgcaggggctcggctacaaggagatccttgcatatttagacggcgggtgtaccttagaggaagctgtctatatcatcaagcgtgagacgcgccactttgcaaaacgccagttgacatggtttaagagagagcgggatgtgatctggctcgacaagcaggcatttggctatgatgatgcagcgattttaacagatatgatatcaattttagaagaaaaggaaataatcagtcatgaataagtggatggaagaacaatacgaagcccttggtatttcaagagaagtatatgaatttggagaaaaaatcgaagattccttaaaagaacgttttgcagcgatcgatgctacggcagaatacaaccagttaaaagtcatcaaagcgatgcaggacaaccgtgtgagtgcagagtgctttaatatgtcatcaggatacggctacaacgacctcggacgtgacacattagaaaaagtatatgcatcctgctttaaaggagaagatgctttagtacgtccgcagattacctgcggcacacacgctttagcacttgctttaatgtcaaaccttcgtccgggagatgaacttttatccccggtcggaaaaccatatgacaccttagaggaagtgatcggcatccgtccgtcaaagggatctctggcagaatacggcgtgtcttaccgtcaggtggatcttctgccggacggaagttttgattttgaacatatcaaagaggcgatcaatgagcggacaaaactcgtgacgatccagcgctccaaagggtatgcaaccagaccaaccctgtccgtggcacgtattggagagctgatctcctacatcaaaggcatcaaaccggatgtcatctgtatggtagataactgttacggtgaatttgtcgaagagcaggaaccgcttgaagtcggagcggacatgatcgttggttctctgattaaaaacccgggcggcggacttgcgccgattggcggatatattgtcgggaaaaaagaatgtgtcgaaaatgctgcttaccgtctgacctctccgggactcggaaaagaagtcggtgcatccttaggtgtcatccagtctttttatcagggatttttccttgcaccgaccgtggtgagcggcgcattaaagggtgcgatcttcgcggcaaatatttacgaaaaacttggatttgaggttgttccgaacggaagtgagagccgtcacgatatcattcaggcggtcgcattccacaatccggatgcactgattgcattctgtgagggaattcaggcggcggcaccggtcgacagctatgtaacgccggaaccgtgggcaatgccgggctatgacagcgatgtcatcatggcggcaggtgcttttgtacagggatcatccattgagctgagtgcagacggtccgatcaagcctccatatgccgtttatttccagggcggactgacctggtatcacgcaaaactgggcattctcaaatctttacaaaaacttaaggaacgaaaacttgtcgaccttgacttgttatgatagaatataatgtgatttatgtatgcttcccgggagagcagagaggaagcatttatgaacaaaattactacggtaaaagaattgccggattcggaaaagccatatgaaaagtttcttacatatggtccggaatacttaagtgatgcagagctgttagcagtgattatccgttcagggacaagcggtctgaagtctgtggaagttgcgcagaatctgttaaatgacggtcatcgcaatttgttaaacctctatgacattccgtttgaaaagatgcagaaaatacgtggaattggtcccataaaggcaatccagttaaaatgtattgcggaattatcaaagcggattgcacagacaaaatcagcaccaaacgtatgcatgactaatccgagaaccatcgcagattactatatggagcatctgcgccacgagaacaaagaacatctgatcgtctgtatgttcgacaacaaatgccacatgaaaggtgataaactgctttctgtcggcagtgcaaacgagacgattgtttcgccgcgtgaggtttttgaaacagcaatcaactgtcatgcagcacatcttatcttagtccataatcatccgagcggtataccggaaccatcccatgcagatgatgtcgttacaaaacggattttaaactgcggacagttgatgggcattccgctttccgaccatgttattatcggagatcattcttactttagttacagagaaaataacaggatcgtggtttaaaccgcgttccaaagggagagaacaatgacaaacaacgtatacggtattgatcttggaacatgcaatatgaaaatttactgcaagtcttccaacaaaatcttaaatgagaaaaacacgatcgcattaaaaaataaagatgagatctacgcttatggtaactcggcatacgcaatgtatgaaaaggccccggagtctatccatgtgacattccctgttacaacaggtgtcatcgcagatttcaacaatcttcagtccatgatacagcttttcttagaaacacatgtcaagggaagcttaaagggggcagaatttattgtggcagtaccgacaagtatcacagaagtagagaaaaaagcgttttttgacatgttctataagagcaagatgaaaccaaagagtgttcttttatgtgaaaaaccaatcgcagatgctgtgggattgggattagacgtcaatgaaccgaccggtatcatggttgtagatatcggtgcagatacgaccgagatttctgtcatttcacttggaggacttgtacttagtgatcttctccattttggcggcaataagattgatgaatccatcattacttatgtaaaacgaaattataatctggtgatcgggcagaaaacagcacagagtatgaaagaacgtttgggttccggtatcccgggcaatgaagatacgatgatcgttgtcggcagagatgttgtaagcggacttccgatcgaaatggaaatgtcaggcggagttgtttatgaagcaatcaaagataatctcgaaagtatctgcaattccatcaaaatgatcttagagaaaacaccaccggaacttgcaaaagatattatccattccggaatctatatcacaggcggaagttcccagattcatgatctggataaattatttgcagatatcacaggaattgatatcaatacctgtgaagaaccggaagagtgcgttgtgcgtggtcttgtaaaaattgtttccgacagcaaatacaaacatcttgccttcagcatgaaaagtaagatcttgatttaggggaaagtatgaaacgaaaaccaaaatttgttcttcccacaaaatatatattgcttatcttaagcggtgtatgtattgtggcaatattactcagttttacactcggcatatccggcggaccattaaatactgtcgccggatatgtatttatcccaatgcagcgcggcattaattctgttggcagctggattggtgaaaaagcagacaatctaaaaaaattaaatgatgttatggcagaaaatgaagacctgaaacgtcaggtggatgatttgaccacggaattaaataccattaaattagagcagtacgagcttgacaatttaagagagcttttaaaactggatcagaaatatccaagttacgataaagttgcagcaaatgttatcggaaaagacggcggcaactggtttacgaattttacgattgacaagggatctaacgatggaatcgaagtggacatgaacgtgatcgcgggaagtggtcttgtaggaattgtcacagacgtaggaccaaactatgcaaaagtttctgctatcataaatgataccataaaagtcagtggtatggttacaaccacatcggataacctgatcgtaaatggcagtttacagaatatgaatgaaaatatggtcattgaattttcaaatctcaatgataaggacaataaagttgccatcggtgatcccgtcgttacttcttatgtatcaaaccgctatcagcagggaattctgatcggttatatcagtacacttaccatggattctaataatcttacaaagtcgggtaccattacaccggcagtcgattttgagcatatcgaagaagttcttgtcattttaaataagaaacagacagcagaatcttagaaatagaggttatttatgagaagaaagattaccgtatttattattattggcgtctgctatctgttgcaaacgacattttttgacacactttcctttgcatccatatcaccaaaccttctgattatcgtaacatcgtcctttggttttatgcgtggacgcaaagaagggctttttatcggttttttctgcggactgctcttagatattttcggtggaggtgttcttggattttacagccttttatatatgtatatcggttatatcaatggaatgttccgtaaacttttttatccggaagatattaaactgccgcttgtcctgattgcaggcagtgatttaagctgcaaccttctgatttattttatcatgtttctttttcgaaacagatacgactttaactactattttttacaattaatgataccagagttggtttataccatggttataacaatttttttgtatttcataattttaaagataaaccagaaactggaagcaatcgagaaaaggagtgcaagcaaatttgtttgataatataaaagaagcatgccgtatgttttttaaatcgcggctggttgtagcaacagttgtgatgattctgctgttttccattcttctgtggcgtattttttctcttcagattgtaaatggaaaagaatatcagaacaattatacgttcaaaatcgtcaaggaacgcaccttaaacagtacacgcggaaatatttatgaccgcaatggcaacctgctcgcctacaatgaactggcatattccattacgatcgaggataatggtacttacagttctacgaaagcaaaaaatgcagcgatcaatgcagaaattgcacaggtcgtaaccgcacttgaagaaaatggagactccattgtcaacgattttaaaatatcgctggatgacaatggcaattacagttacaacatagaagaatccggcgcaacctggaaacgttttctggcagatgtgtttggagaggcttcatttgaaagtatgcaggaagatgaatctgacatcatttcccgcaacaaacttgattttaaaccgacggaagcaaccgctgcacaggttatgcaatatctggcgggcagcaaccgttatgccattggaaccgaatatgatgatgcaatggcatataagattactgttgtacgtttttccatggcacaaaatgcctatcagaaatatattgcaacaacgatcgcaacgaacgtttccgaggaatcggttgcctatatcagcgaacacgctgcagaattgcagggggttgaagtattagaggataccatacgaaagtacaacgatagtgaatatttttcttccattatcggttacaccggaaaaatatccaccgacgaatacaataaactttcagagacagatgattcctatactttaaatgacgtagtcggtaaacttggtattgaacagtatatggacagcgatttaaaaggtgagaaaggtcatgaaaagctctatgtggattatcttggaaaagcggtaaaagtcattgaacacgaagaaccgcaggcaggaaatgatgtctatctgtctatcgacaaagatcttcagattgcagtatataatcttttagagcaggagattgccggaatcgtatactccaatattgataatcctggatcagatatcaatattccgatcacagatgtctattttgcactgattaacaataatgtgattgatttttcacatttttcagaagaaaatgcatcccccacggaacgggaagtacagcagatctttgccagcagacaaaatgctgtaattgaacagatacgcaccgaactgaccggaagtgcaccgacaccatttgcatcgatgacagaggaatatcaggattattttacctatatcataaaaaatatgcttcatgataacaatatcctgttaaagaaaaatattgatacgtccgatgaggtttaccttcaatggcagaatgggacgattggcccgcaggagtatttaaaccatgcaattgccaaagggtggatcgacattacaaagttttccgtaagtgaaaaatattcagattctactgaaatatatgatgcattgtgtgattatattctaaatgatatcagtacagattcagattttacaaaaattatatatgaatatttaatccagaccgatgcaattaccggaagacagctttgtctgatcttatttgatcagaatattctggcatttgacgaggatgatattgcaggattatcaggcggcacaattgcaccggcttcctttatcaaggaaaagatccagaatcttgaaattacaccggcacagcttgccttagatccatgtgcgggctcctgtgtgatcacagatacaaagacaggggaagttctcgctttggtaagttatcctggatacgacggtaacaggcttgcaaacaccgtcgattccgattacttcaacagcctgcagcaaaataatgcaagacctctgtacaattatgcaacccagcagcggacggcacctggttctacatttaaaatggtatcagcgacgacaggtcttgcagaacatgtgatcagtacgacggagcagatccaggatcttggagtgtacaaaaacgtaagcaatgaaccggaatgctggatttatcgttcttcccacggatcacatggtcttattaatgtgtctgaagcacttagagattcctgtaactacttcttctatgaagttggttaccgtctcagtaccaataattatgcaatgagctacaataatgatgccgcagaaaacggtattgaaaaaattcagaaatatgcttcactttatggcctgaatgaaacaaccggcatagaaattgaagagagcaaaccgcaggtcgcagatagtttccctgtcatggctgccattggtcagagtaataataactactccacgatacagctcgccagatatgttactgccgttgcaaacagtggtaccgtatataattacacacttttaaacaaagtaacggattctgacggaaacacattaaaacaatacgaaccggagatccgcaataccgtggatgtcttaagtgacagtgactgggatgccattcataccggtatgcgcatggtggttgaaaatacaaaagaattcgatggatttccaatcgaggcagccggcaagacaggtacggcacaggaggatctgaaacggccaaaccacgctttgtttgtcggttatgctccgtacgataatcctgaaatatcaattgcaacgcgtattgcaaatggatatacttcccacaatgcggcagaagtttcaaagaagatccttgcatactatttcaaagttgaagatgctgattctctgttaaacggacaggctgagaatattaatgctacatcaaatggtgtaaatgattaacatttgaataattcccgtttttttgcgggttttattaataaatcaaaacaggaggttccctcatgggtgaagtgattacttttacctcaggaaaaggcggcgttggcaaaacgacaaccacagctaacgttggcgcaggactttcactgttagataaaaaagtcgtattggtagatactgatatcggcttacgaaatcttgatgttgtcatgggactggaaaaccggatcctctataatctggtggatgtgctaagcggcagatgcagggcgaaacaggcaatcatccgggacaaacgattcccgaatctctctgtgataccgtcatcctgtacaaaagaaaaaattctgcttgattctgatcagatgaaacatctgcttgatgatctaagacaggaatttgattatatattagttgacagtcccgcaggtatcgatcagggatttttacttgccattacgggagccgaccgcattgtagtggtcacaacacctcagattgcagccattcatgatgctgattgtgtacttcagatattaaaaacacattatacggtaaaaacagaacttctgatcaatggttttcgcaagcacatggtaaaagacggagatatgctaaatatcgatgatatctgtgaacttttagatgtgccattacttggtgtcgtgccggaagatgaacagatcatcattgcccagaaccatggcgaaccgttgctgcatctggatggaaataaaaagaatgcattactttctgagctctgctacaacaatattgcacggcgaatcacaggtgaggaagtgcctctgttaaattacataaaacagggcagtattttttcgaagatattttttaaaaagaaacctgtgaaaggagcgctgcatgtttaaaacccattccggaaatgttgcaaaagagcgcttaaagctgatgatgaatgcagaccatcaaaaactggatgatgccactatggaactgatccgtcaggagataggctgtgttatcacgaaatatgtggttatagagccggagaacattgagattaaagtaatgttaaaggattacaagaaaagagagtaggataatgtctaaactttataaactaaagaattacaaactcatactggtcatatatgttctgatattaaataccctgggggtctttctggttgggagcgcaagccccggggatcagaaaaaacagatcatcggtatggtgagcggtattgtcatcatggtgattttatctctgatcgattacagttttatcctccgtttttcctggatcatatatctgctggcagtcggtctcttagcactggtacttgtcgcgggtgattcttcaaaaggagcacagcgctggtttgagattggcggtatccgctttcagccatccgaacttgtaaaaatacttttgattttatttttcgcgtattatttcatgaaatatgaggagaagatcaatacggtaagagtgattgtttcttcgtttgtgttacttgcgattccgctgtttttaatctataaacagccaaatctgtcgacaatgattgtaattaccttagttttttgcgcattattatttatggcaggcttaaattacaaactggtcgtcggtgtgctgatcgtatgtattccggtcggactgattggaatgacactgatcatacaggataaaatcccattcatccacgcttatcagctggggcgtatcatggcatggctttatccggacgattatccggatcttgcctaccagcagcagaattcgatcatggcgatcggttccggactattatggggaaaaggacttaacaatacggatccgacttcggtcaaaaacggaaactttattttggaacctcaaaatgactttattttcgcggttgcaggtgaagaacttggatttgtgggcagtgcagtgatcataattctcttgcttttcatcacgattgagtgtatatttattgctagaaaagcaaaagacacagcaggcagactgatctgttgtggtgtaggtgcgctgattggttttcagacttttgtcaatatcggtgtggcgagcgggcttctgccaaatacaggtgtaacacttccgtttgtcagctacggacttacatcattatggtctttgtatataggtatcgggcttgtcttaaatgtcgggcttcagccgaaaaaatattaacaacagggggtcctacaacatgaacattggattaatagcacacgattcaaaaaagaaactgatgcagaatttctgcattgcctatcggggtatactttgcaaaaatgagctttatgcaactggaacgaccggaagactgatcgaagaggttacaaatttaaacgttcataaatatctggcaggacatttaggcggggctcagcagttaggggctcagatcgagcacaacgagatcgatcttgtcatttttcttcgtgatccgttgacaccaaaatcacacgaaccggatgtcaacaatgtcgtaaaaatctgtgatacacacaacataccgcttgcaacaaatcttgctaccgcagaacttctgatcaaatctttagacagaggcgatttagagtggcgtgaaatgtacaaataacagaaacgaataatagaatacacactttgtgaacattctattattaagaataaaatatatacgcaggatatacctttatctggtgtatcctgcgtattttatgaaaggaattttaacatgaaacgattgctatctgttctgtgtattacagcacttttacttggcagcattaccggttgtggcaaagaggaggttacactggaacagccttatgatatttatgaaacgaccggaagtcttggtcttggaacaactgtttctgccggtgcacaggaatatttttcaaaagacctgtgtgtagccgatgacgtttcacttggtacagatacaacggattcacaggttgcagaaggcgccggtacttttaatctggcaacaaatgagattgtctatgcaaaaaatatatatgagagactatatccggcaagtacaacaaaaattctgaccgcatatattgcattaaagtattgcacagatttaagccagacggtcacgatcagtgaaaacgctgcaaatcaggcctccgattcctctgtctgcggtcttcatgccggagatgtgatccgcatggatgaccttttatatggtatgatgctgcgaagcggtaatgatgctgcgattgcaatcgcagagtcgatttcagggagtgtggaagaatttgcggcactgatgaacaaagaagcagccgcactgggagcgacacagtctcattttgtcaacccaaacggacttccggatgaaaatcattatacctctgtatatgatctgtatctgattttccgtgcggcattacagaatgaaacatttgtccagatcataagcacgacttcctatgatgtaacctatcaggcaggagatggtacaatagaagaacatacctgggaaaatacaaaccagtatctgagcggtcacgcaaaatctccggacggttttaccgtaattggcggtaaaacgggtacaaccggtgctgcaggatactgtctggtgctttattccatgaatgaacagtcacagccaattatttctattgttctgaaagcagacggaaaatcaaacctttatctgttaatgaatgaaatgttatccggttttgcaaattaattgaaaatattattgttttttttgtgttaatatactataattaatttataaaacgaaccgtttttattcattttcacgaatatggacgttgcatcgaaggatcaggagggaaatgaccatgatagagattatttcaggcgaaaagggaaaaggaaagacaaaggaactgcttaacaaggtcaatacatcgatcacatctgcaactggcaatatcgtatatctggataagagccagaaacatatgtatgagttaaataataagattcgattgatcaatgtaaacgattttctgattgataactgtgatgaatttctcggtttcatctgtggtgtgatatcacaggatcacgatcttgaagaaatgtaccttgacagttttcttaccattgcatcgatagattccgatgaacttttaaatcatgcgattcaaaagcttgatgtgatcagtgaaaaatacaatgtaaaattcattttaagcgtatccaaagatgaatcaaaactgacagatattgcaaaagcaaaaatcgtcatttccctataaaaatgaatatgtaaacaatcagataacacacaccatgtgaatatatcttttgttatgaattatgcggtatggaaagatctcttatccataccgcataattcatgataacagaatgtttgcgaaacatgcattctgttattaagattctcctacagaacggattcttccgaacaagctgagcagatataatcccccaattcccacaagtgcataaataattcttgtaagccatgacatatccccgaaaagaaatgccaccagatcaaatctgaaaaagccaatcagtccccagttaatcgcaccaatgataaccaatgtaagcaatgtgtaatcaagccagtttgtattcatttttttagcctccttttgcagatagtatgcacgcaaaaaaaaatttttattcgtataaaacttttttatcctcgttgttttctattgaataaaatgttagaataggaatgttgaaaaatttaagaggtgagtaaatttttgaatgaacataaaaaagtagtaaaatatcgtaaaccgttcaacataaatattggtgtaatcatttttattattattttcatatatcttgtattcaatgttttcacttacattacaacaacgcatacttctgtttatgaagtggagcagggaaccatggcagaaaataatgtttaccgcggtctgatccttcgggatgaaacaattgtcacatcgcaatacgctggatcactgaactattatgtacgcgaatcatcgagagtcggatacggagatctgatctgttccgtcgatgaaagcggaagcgtttcccaaaagattaatgatgtaagtgcagacgcctctaatctggatgccgaaggacttttagaaattgaaaatgatatttccgactatgaaaattcctatcaggcgcagacattttataatatttattcatttaaagaaaatattgattctgcattaaatgaagccttaagtctggaagctttaaacggattatcggattatacatccgctgccggaaatggttcttcttttcatacgatcacaaccgatacacctgggatccttgtttattacacggatggatttgaaaatacgaccacggacaatttttcaaaagaacagtttgatgaagcgtcctatcagcgcaataatttaaaacagaatgtatccgtttctaacggggatgcggtttataaactgatcagcaacgaagaatggcatattgtcgttcctattacaaatacactcgcagatgaacttgcagatgacaacactttaaaactccgttttaataaggatggtaaaacggcatacgctacctatgtgattacagaaaagagcggcgaaaaatacctgattttaacacttcgcaattcgctggtacgttacgcaaaagatcgttttatagagattgagctgctgcttaccgaacagaccggactgaaaattccaaattcggcaattacagaaaaagaattttttaccataccggtcagctactttatgaaaggcggggattctgatgccgatggactgcttgtttcgtccacaaacaaaaacggaaagacaacaacagagtttgtttcgccaacgatttattacacaactgacgattattactatatcgacagtgagaatgttactgccggagacattctggtaaaacctgattcgaatgaaacttaccgggttggctcagacactgcaaccttaaaaggtgtctataacgtcaataaaggttatgctgttttcaaacagatcgatatcctttatcagagcaaggagtataccatcgtaaaaaccggaacttcctatggaatttccttatatgaccacatcgctttagatggagcgaagatcaatgaagatgatttgttaaaataatggagggaaaatgatatgttaaaagaaaatcttgccaatgtcgaaaaaaatattgaacaggcttgtaaaaatgccggacgcagccgcgatgaagtaaccctgattgcggtaagcaaaacgaaacccgttgaaatgttacaggaaatttacgacgaaaacatccgtgatttcggtgaaaataaagtacaggaactctgcagcaagatggagcagcttccatcagatatccgctggcatatgatcggacatcttcagcgcaataaagtaaagtatattgtgggaaaagttgagttgatccattccgtggatacataccgccttgcagaagagattaacattcaggcaaaaaaacagaatgtgatcgttccaattcttgtcgaagtcaatattgcacatgaagagtctaaatttggtatttccgcagaagatgcaatccttcttgtggaagagatttccaaacttgaaaatatccgtatcaaaggacttatgacgattgcgccttatgttgaaaatccggaagataatcgtctgtatttccgaaaaataaagcaattatctgttgacataactaataaaaacatagataatgtatttatggaaattctgtctatgggaatgacaggagattatatggttgcaatcgaagagggcgctaccatggtgcgtgtaggaaccggaattttcggtgaaagaaattataaacaggagtgagaacatgggagttcttgataaatttttaaatgttatgcgtctgaatcctgaggatgacgacgatttttacaatgaagattacgattacgatgatgattatacagaggacgagccaaagcagacattccgtcgcgagaagaaacgtgaaacagtagaaaaagattatgattcagatcgtccgaaggagactccggtaaaatcctcatccaaggtaacgccgatccgtccatcgaaaaaacagactggtcctggcggtatgcaggtatgtgtgatcaaacctacttctgttgaagatgcgagagaaattacagagactttactggagaaccgtactgttgtcctcaatgttgagggccttgacgttgagattgcgcagcgtatcattgattttacatccggttcatgctttgcaatcagtggtaatctgcagaagatttcaaattacatcttcattatcacaccggcatctgtggatatttcgggagattttttaagtttaatggattcatttgagacaaggggtattcagaccgatttttaattatgaatgagcaggaactttgtaaaaaacgtctgttggatctttccagacaggctgaccgaaagggaatcgttttattcagcgatttccttaatttaaatgaactgaatatttaccaccagtgtgaatccgaatttgccacaaagacggagagctttggcggggtttcctatgcagagcgtcagataattgcttttattcctgatgctctttattatgaatggacgtacccgattgcggcattaaaggtggaacccgcttatccgaagtatgcagaaaaattaggtcaccgtgatctgcttggatctgtcatgacactcggtatagaccgctcaaagatcggtgatattctgatgggagacggctgttattatatcctgtgtgaggaaaatgtggctccatactttatggaacagctcacaaaagttcgtcatacactggtgcgcttaagtgttgtaagtacagacgaaatcagttcgcatcaggagatgatcgataaagatggcatcattacctcaaacagacttgattctgtcattgcctgtgtataccgtttatccagaagccagtctttagaactgatccgcgcagatcgtgtatttgtaaatggaaaaaatattcagacaccaacctatatctgcaagccggatgatattatatccgtgcgtggtcatgggcgttttcattttatttccatctcaggagaaaccaataaaggacgtctgaaaatcaaatatcagctatataaaagttaacagaacactcatatgcaaaaatgcagaaacggaggagtattatgtcaaaaagtataccggttacagatggaacaaatgtgatctatacgattgaattaaaaaaagattttggggatctttgtaaagaactgaccagactcaaaatcagtcctgaccagaaactttgtattgtcacagattccaatgtagcacccttatacgcaaaggaagtacaggatcagctttctgcggtattttcaaatgtatttttacatatttttcctgcaggtgaagcaagcaaaaacacggataccgtaggtgcgttatatcagtttctgatagaaaatcacttcgacagaagggacatcctcttagcacttggtggaggtgtagtcggtgatctgaccggttttacggcagcaacttacttacggggcattgatttcatacagattccaactacactgctttcacaggtggacagcagtattggcggcaaaacgggcattgattttatgcagtataaaaatatggtcggtgcattttatcagcctaaattagtttatatgaacctgtcagtgcttcattctcttccaggaaaacagattgtttccggaatgggagagattatcaagcatggcttgatcaaggatgcttcttattttgaatggctcatcgctcatgaaaaagagatctgtgcattagatcctgaaattttagaagaaatgatctacataagctgtaatatcaagcgtgatgtggtcgaacgtgatcccaaagagcagggagagcgtgcactccttaattttggacacacgattggtcatgccattgaaaagctttctgatttttcgctttaccacggagaatgtgtaggacttggtattgttgcggcatcttatctgtccatgcagcttggccatatttcaaaagaagattttgagaaaatacaaaatgctttatcgctttttgaacttccaacacagatggatggatttaacgcagaaaaagttctttccgcaacaaaatccgataaaaaaatggttggaaaccaggttaagtttattctgttaaaagagattggaaatgcttatatctaccgcgagctgacagatgaacagattcttgacggtatccgttatgtctgccattcctaaaatgatttccaaagaaatgagggctcaatgaaacaacaatctaaaaccattcaaaaaaaagcttttatcggtattttatgctcagtcattctgatttttttagaccagtttacaaaatatcttgcagtacagcatttgaaagatcagatgcctgttgttttgtggaaaaacgttttggaactcagttatttagagaaccgtggtgcagcgtttggtatttttcagggaaaacagtggccgcttattatttttaccgtgattgttctgatccttatcatatatttttatctgatgcgcattccttcggaaaaacattttggcttactcaatggaatcaccattctgttttttgcaggtgcgatcggtaactttattgaccgggttacgcagagatatgtggttgatttcttttatttcagactgatcaatttcccggtgttcaacgtcgcagacatttatgtgaccgttgctgccgtacttttgatcttatgtctgctgttttataaggaagaagactttgaacgtattcttcccacaaaaaagaaatcatgatttttgtataccattgaatatacataccagaatggagattttatgaaacaggaaactttcgaaatagaggcagaatatgagggagaacgcttagataaatatctaagcgttatttttgagcagtcaaaaacctcttcaaatgcaccttcacgttctttttttcagaaactgatcagagacggccatgtaaaagtaaatgattctatagcaaaagcaaattaccgtctgcgtatggatgaccttgtatgtgtggaaattccagacgccgtggaaacaccgattgtcccggaagatatcccgcttgatattttatatgaggacgatgaccttctcgttgtcaataaaccgaaaggaatggttgtacatccatcagcagggcattattcaggcaccttagttaatgcgattatgtttcactgcaaagacagtctttctggcattaatggcgaaatacggccaggaatcgtgcaccggatcgatatggacacaaccggttcgctcattgtatgtaaaaatgatgagagccatgttaaaattgcagagcagatcaaagagcacagtgtcaatcgcagataccgcggcattgtatatggcgttgttaaagacgatgaaggaacgatcaatgctccgatcggcagacatccgaccaaccggaaaaagatggcgatcaacgagaaaaatggaaagccggcgatcacacattataaagtactggaacgtttttcgaattatacctatatggaatttaaattagagacgggcagaacacatcagatccgcgttcatatggcaagtatcggtcacccgttacttggcgataccgtatattccagtggaaaaagtccgtttaaaacgcaggggcagacacttcatgccatgacgatcggttttattcatccgcatactaatgaatatatggaaatatcggcaccactcccagaatattttttgaaaatactaaaaagtttgcattaaatttcgaaaaattgttttaatttttgaaaaaatgtagtataattatacaaaagaaacagatatcatcatatgaaaacgaggcgttttgcatgtattgcacaaatatttcgtaatatgtaagatattctgctgcaaaagaaagtgggggattcctatgtcaaataagatatataccattggtcgtgaatttggaagcggaggtaaagcagttggtgaggcacttgccaacagacttggcatcaaattatacgacaaagaattattacagcaggcagcgaaagacagtggcttttgcgaagagatttttgaaaatcacgatgaaaaaccaaccagcagctttttatactcactggtcatggatacatactccgttggaagctacaattcttcaccgtttcttgatatgccgttgaaccataaagtattccttgcacaatttgaaacgatcaaaaagattgcagatcgtgaatcctgtgtcattgttggcagatgtgcagattacgcattggcagattatccggactgcatcaatatttttatacattcagatatggaaaaccgcgtcaaagctgtcagcaaacgcctgaatatcacagagaataaggcaaaagacctgatccagaaaaaggataaacagcgcgccagctattataattattattccagcaagcgctggggtgattctactagctatcatctgacactggatgccggaaagcttggtattgacggatgtgtcgacatgatcttaaaattccgtgaaattatggatgcacagaaataaaatagaaatatcccggaaaaaagtccctgttaaggtgtatagccttaatggggatttttttgtaaaaatgataattgcaaattgattagttttgttgccgacacagcgtatattgagttaataagctacagactatttgcttccgaatacaactattcgttaaacttgtgttttgcgaatagaagaaaagacaatcaaacaactcaaatacactctgctacatataaatttatacaaactttatcatcaatgcatccatacgaaaatcccgtgttaagataaatatctggttaacacgggatttttctgaatgacagcctgcaaataaatctatattatttacattttactttttttactactgaatatgcgccatatatttttttacctttcacagttttatatgcgcgtaccttataataatacgttttttagaagaaacttttttatcaaggaaagttgtttttttcgcgtttttaacggtagaaacttttgtaaattttcctttatttgaaacagcagtaagcgcattccagcttaaggtaacactatctacttttacagaattcacctttacatttttcggtgccgttttatctacggactttactgttactgtcaccgttgcctttgctgagttatctgctttcgcagtaataatggctgttcctgttcctttgattgttaaattgccactggaagcacctattgtcgccaccgcattattagaactgctccagtttacatttgcttttactccggtcggtgtagttgttgctgtcagctgataactcttatttttatttgtgtcataatcataagtcagatttgctcttccatcacagatctgaacacctgttatttctgattctaatgtcggtaacaacaataagtactggttatctcccgtacaaacttcatcttctgttgtaactttaacaatataaagtttgtcttttcccggagtaacattcattttacttctgtcaagttcaaatggaacaacaacagaatctgcattcgtgacatctttgatcgttctctggaaaacaatatctccatctaacgaatcttcgtatactttcagttccacatctgcatttcgtgctgtcagattagaaatctgtgcatacacatcaatgatattatcatgataatattccgttgtttttagcgaaacatctgcatatccgagtttaatttcctgttcattattttttgtattgcgatcttcatcttgattgatcacaaacctgtatgtttgcacttctttcgatacggattttgaaaatgtaatttcaatctctttttcttctcctgaagcaatactttcattacatccacggtatcgatccagtcatcatcctcatatacatcaacagtaaatcctgatgcatctttcaccccttcatttccaacggaaattgtcgctgtctgcctgccgtttgcataattttgttcgctggcgctcacattttccaatacaaggtcatttgcttcaacagtttcctggtaagcaaagataaactcatccgcatcattgagatcataatacccgaatacaatatggtaaattccatcggacgttttataaattgctggttggtaaatgtattgttggtagtgtcaaatactgcaaatgcaagttcaattcttccggcaagatctttaatctgctctgtcgtgttcagattaacagatttcttgtgtctgtcttttgattcttccgtttcagtctcttcaatttcagtttcttctatttcgacttcttcggtttcaatctcctcagtttcaatttccccggtttcggtttcttcggtttcagtttctgcttcttccgtctgaatctcttctatttcttccgtctcggtttcaactttctcagttactgcttcttccgtttcgactgttttctcagaagccatttcatccgtttcctgaggttcttctttgctgttccgccaatgactggaacatctcccggtacggtataaccaactccatttccaaatttgaaattttcgctgacttttgtatcagtaccaatgaatctggatgctttcgactttataaaaatgttggtcttaacagcctctgattttacattgtttccacatacaacctgtaagtaaaagaactttccgggcggatcagcccgttccccgcactgacatttataccatataaaaattatactaaaataattccaatcaaaataaaccgtataccacccagcataaatcctgttatgccaaatagcataccaaaatcattttcctcctttctttcaaatttcctttcaaaaaaatcaaccattcttacgattttcatcgtatgagttcatcagaatcaagaatgatcgtaaaaggtccgtcattcacaagggatattttcatatctgctccgaaaaccccctgttctacaactgcaatctgatttttgcagttctcaataatatagtgataaagttcttttgccatgtccggtttaccggcatctgtaaaagatggcctgtttcccttccggcaatctgcatataaggtaaactgtgatattaataacagacttccattcacatccttcaatgataaatttgtctttccttcagaatcttcaaaaatacgaagtccgatcagtttttttatcattttatccgcaatctctttcgtatcagaatcggatatgccaatcagtaccataaaacctttttgaatactgcccgttacctcatcatctacgcgacatgcggctgaacatacgcgttgtactataaatttcatgatccatatctactccttttttcataatttcaaacccattttttataccaaatttcataaccataaatcctactataaatttaacatatttttaataatttgcatatactttcccacattaaacaaaaaaagtaataattttatcctgcatcatccggattaaaaattaatatacctttgccttaaaatattgtataataaagaaagttcaggaggcctgcatatgaaattacagcaattatacagctacacgcgaaaagcaattgatcattatcagttgattgagtccggcgataagatcgccattggtatttccggaggcaaagattctcttacacttttatatgcactgagtggtctgcgccgcttttatccccaaaaattcgatctggtagctgtgaccgtagatcttggctatgaaaattttgatcttacagctgtttcaaaactctgtcatgatcttgacgtctcataccatatcgtaaatacagaaatagcaaagattctctttgaagaacgaaatgaaaaacccacctgttccttatgtgcaaaaatgcgcaaaggggccttgaatcaggcgataaaagaactcggatgtaataaagtggcatatgcacatcatatggatgatgtgattgaaacagcatttttatccatgatctttgagggacgcttttatgtatttcccccaaaaacctacatggaagattctgatcttaccataatccgtcctctgatttatgtatctgaggcagaagtaaaaggattccggaataagtatcagcttcctgttgtaaaaaatccatgtccgatggacggtaataccaaacgcgaatatgtaaagaaactgatacagcagttaaatatagacaatccgggggttaagacgaaactttttcatgcaatccagaacggaaatatacaaggatggctgtccggtatcaataatgcaatttaagtcttatgttacttttttaaaatccccccacaaactggagatcacaatgaaagaaaaagcatattatgaaacaataaacgtaaagaatgaagtaaagttaagaaaactattagaaacactgccacccttttgcaaacagttttttattggcattgaagcaacaagctcttccaggacaaaaattgcatacgcatatgatatcgggtgtttctttgattacctgcatgctaccaatccggtctgtgctaaaatggatattacagattttccaatctctattttaaatgaaattacaccaatggatattgaggaatatctttcttatttaaaatactacgaaaaagacggaacggaacacaccaatgatgaaggtggtttgaagcgtaaactttctgcactgcgctccttttatcattattattacaaaaatggtttgattgaagatgatccaactgttaaagtagacatgcctaaaatacatgaaaagaatattatccgtctggatgtcgatgaggtggcaaagctccttgacgaagtggaatctggcgagaatcttactgcgagacagcaacagtatcatgaaaagacaaaaatccgggatctggcaatgatgacacttcttttaggaaccggtatccgtgtttctgaatgtgtcggcctcgatatggaagatgttgactttaaaaataacggcattaaaatccaccgcaaaggtggcgcagaagttgtcgtatattttggagaggaagtccgcagagctctcatggattatatggtggaacgccagaaaatcactgcagccgacggaagtatcaatgcgctcttcctatcacttcaaaacaagcgcataagtgtcagatccgtagaaaatatggtaaaaaaatattccaagcttgtaacaaccttaaaacatattacaccgcataaacttcggagtacctacggtacatccctctaccgcgaaaccggcgatatctatctggttgccgatgttcttggacataaagatgtcaatactacccgtaagcactatgctgcacttgaagatgaaagacgccggagtgctgcgaaatatgtcaaattacgtgagatctgatttctgtgtattattaaaaaagtgctatatgacattttatatcatataacactttttctaattcataacaatagaatgttcatggaagatgcattctattgtttcatatattatgtctccggtaacaatatactgtcaattttttcctgaatcctgcgctgtaccagttctgcaatctcatgtgttttcaatgaaccatattcatcaaataaaataggtttcagatagtgtacctgtgttgtcacaggtcccagattaaaactgttaaaaaccttataggaatcgatcagggcaaccggtataatcggtgcctttgtctttaaagcaattttaaaactaccggccttgaaattgcatacgttattacgattattgaaatcgtacccgccttccggaaaaaggatataacgtttcccctttttaacgtcttctgaaacttcattaatgattgtaagcgcctgccttacatccttcttatccagacgttttccctgcagcagatcgataaattcccgaacgaggatcgtattggattttgcacgatccatgacgatagagcacggttttttatgggtataaataataccaagtgcgtcatactttccctgatggtttggatacatcatatagccgccctctgacgggagattttccagaccatatgctttcgtcttaattccaccagtcgttttcataaggcgaatcacatggcgcgcaagctcatatcgctcttcttctgaatatttttcaggatgatccgcttccttatgcatctttggaatcatatatggtgctctgaaaaggttcataagaattacataaataaactttaacatatcttcaacgctatcctccgtacctggcatataccctgaatatcaccacttccatcgggatatttttatgccgaatataattattatagcttattttgaagaaaaatacaacatccccacagactactgttttgttcctactgttttgttgctgttttgttgctgttttgcgctgctatttgggcacctattttaaatattctgctgaataatatggcactgtcagatattcgccctcatgaatatcatccggaaagatatgattgatcatacatacctcttctatataagctgaggtatctttataatcatcggtcatataaatccctgcaatgtcatttaacgtctgtcccggggtaatctgtatgctggtataatatttataggcactggtttcatcagccgcctgtgcccggatcgtaccaaaacatgcggaacacattattataaatagtaccattgataatgcgatcaaaaaaactgatttctgctttttcccgctttttcttctgcttctcataaacaccctccatcacatgcgaacatttgttacgaacagctgtttgtatatctgtatcataatgcacgaacatttgtttgtcaagtgaaaaatcgaacaaattttcggaatatacgtttgcattttcatttgttttatgataaaataaatacggggcagaatcatccctttacaagattgataaaatacattttatcgtataataggaggcactttatggcatatggcaaaatcagcagtaagcagcgagaaattttagaatatatcaaacaggaaattttaaacaaaggttatccgcctgcagttcgtgagatctgcgaagcagttcatttaaagtcaacttcttctgttcattcacaccttgagactcttgaaaagaatggttatatccgaagagatcctacaaaaccacgtgccatcgagatcattgatgacaatttcaacttaacaagacgtgaagtcgtaaatgtccctatcattggtcaggtagctgccggtcagccgctgcttgccgttgagaatatcgaaaattactttccgattcctactgagtttatgccaaatgcagaaacgtttatgttaaaggtaaaaggggacagtatgattaatgccggaatatttaacggtgataagattcttgtacagaaacaatcagatgcacagaatggagatattgtcgttgcgcttgtagatgattccgcaaccgtaaaaactttttacaaagaagacggtcactttcgcctgcagccggaaaatgataccatggatccgatcattgtgaatgaatgttcgattcttggtaaagtattcggtattatgcgatttttaaattaaggaaaaggcagctgattttcatgttaacaatcagctgccttttccgtttatgttcataaaactatttacaaaacatatcactattttttacagttcatccacactgatctctttcccatctttccagatacgctcaagatcataaaaaagtctgtcctctttcgagaaaatatggataatgatatcattatagtccatcagaatccatgtagaagactgattgccttccacctgccgtactttaagatctgccttatataaagcttcatctaccgcatcacgcattgcctgaatctgattctggttcattccatctgcaatgataaaaaaatctgcgatcggtgaaatttcacggatatcaattactttcacatcctctgccttcttgtcttccagtgccttcactgctattttacaatattctgctgaagtcataaatctacactctcctattatttttgtttattttcccggcaatggcttcatacaccacaccagaaaggcatgtttaaacttgaaacatcaatcatgttttttcctgtattgacggtaaaaatcataggtcatctttgttgttgcatcgatacttccaccacggctggatagataagccagcgtatcatgcaggatttccgccatacagacatccagatcttcaaaagcgatcttccttatatagggaaggttttctgccttatcccgcccaggctcaatataatccgcaatataaatgattttgtctaagaggctcatatccggttcaccggtcgtatgcactttgattgcatgtaaaatctgtggatccgatacttcatataccgtttccgccaaaaatgcccctaattttgcatgcagcagatacggacttttatattctaccggattgatcagaatgtgatttttttcacacatttctattttctgatcatttgggatacactttgcacagtcatgaagtaatcctgcaagcattgccttttccatggaatactcatgtgccatggcaagacagcccgcagtgtacataacacctttcgtgtgctcataacgccccttatccagttctttttttaacttttttcgaatttcatttaattccatgataatctccatttcagaccagcttattgcgaagagatgctgccgtcagatttgcgcagacataattgcatgtcttatcatctaatcctcctcatacaaatgatgttcctgaatatatgccagtactttaggcggaatcagcgaaatatctgtttttccgcgtcttaaagccgcacggatctcactggatgaaatatctgtttttccaccctcgattggatagatttcagcaggaaatagctgttttaaggcagaaatctttttctcaacctccgacaaatccatatcatcacgtactgcagccaaaataactgccttctcacagataatttcaggatgataccatttttctaaataatcaagggagtcagcccccataataaagaaaaaatcagtatccggacaagcctcttttaattttgtgagtgtcagataagtataacttgtcccctctgcatcgatttccattcgtgaaagtttaaaatatggaatatcatagatagccagagctgtcatttccgcccggatatctgccgctgtcatttttttctcgtctttattcggagaatgtccggcgggaataaaccatacttcatccaatgcaaattcttcatacgcactctgcgcaatatttaaatgtcccttatgaatcggatcaaaagaaccgcctaaaatgcctaccctctttaaatgcttttgtccgatcctgcactctgcatcttccatatcagcccggcagttcgtacttggtatttttcttcgcctgacggaataaaacgatcttctttccaattaccttcacaacctcagaacgtgtccgctctgcagtcactgcagcaatctctctcggatcatcaatacagttttttaatacagccaccttgatcagctctctcttttctaatgcttcgtctaacgctgtaatgatctccggtgtaaggcttgcttttccaatatgaaagatcggatccatcgtgcttgcacatccgccaaggtatgcacgctgtttacttgttaatgccataacattcctcatttccgcaccgtttcccagtgccattaatatcacatcagtttcttattatttataataatcaaattcaaatccatacatacgcacagtatcgccatcttcgattccctgggcttctaattcttttaaaataccctgttccttcataaacttctggaagaataaaaatcctttttcagaatcgatattggtataaccaagcattttttcgatctttggtccctcaatctcaaatgctccatctgccgcctgtgaaatcgtataaggctcatccttaaagaatcgcagtgccggatcaaattcaggctcatagatcaccggctcgctgtcgcagtgatcgagcagctcctgaacatgatacagcaactcttttaatccctttccgctgactgcagaaatcgggaatacacggattccgtctttttcgaactcctgtcttaaagactggacgatctcattctcatcaccgtacaccgcatccatcttgtttgctgcaatcacctgcggcttttctaaaagtttcggatcatatgcctctaattccttcatgatagcacggatatctgcgattggatcacgtccttcggttccggctgcatcgaccacatggatcatgacttttgtacgctcaatatgacgcaaaaactcaagtccgagtccgacaccttcagatgccccctcaatgagtcccggaatgtctgcaatgacaaatcccttcgcaccatctaagtctacgacaccaaggtttggctgtaaggttgtaaaatggtaattggcgatctttggctgtgcattggttacccttgacaataacgttgactttccaacattcggaaaaccgaccagaccgacgtccgcgatcacctttaattccaattttacttccagttcaatggcatctccacccggctgtgcatatttcggcgcctgcatggtagatgttgcaaaatgctggtttccaagaccgccgcggccgccttttaagatcacctgtctgcggttgtcaccggacatatcagcaattacttttccggactctgcatctttgatcacagttcctgccggaacttttaagatcagatcctcgccgttctttccatgacaattgcgttttccgccttcttctcccggctgtgcggcaaactttcttctgtgacgatagtcggtaagcgtatttaaaccgtcatcgaccacgaatacgatatcaccgccgcggccgccgtctccgccatccggaccgccgtccggcacatatttttccctgcggaaactgacatgaccatccccgccttttcctgattttataataattgttgctctgtctgcaaacatatttttctacctcaaatttaacaaaaacacgtacataaagcagggttcaacctgactttgaatacatgtgaattacctgtcacattcttaatacaaatagaacccggctatcacatccatctgcgatggatgtgccatctgtgatgggtgttcatagtcgggtccacagtacatcttattcagctactggataaacggaagcctgtttcttatctcttccttttctttcgaatcttaagataccatctgttaaagcaaataatgtatcatctccaccgatacctacattaacgcccggatgaatctttgttccacgctgtctgtataaaatgtttccagcttttacaaactgtccgtctgctctttttgctcctaatcttttagattcggaatcacgaccgttctttgtagaaccaactccctttttatgagcaaaaaactgaaggttcatatttaacatgtcttacacctccctgaattttagaatgatataatcatttccataagtgttttgtattccctgcaaacctaaaaccaatgacttcataagtagatcggcatcatgtcctgccggggaagaaaacgataagcttatctttcctgtctcctcatccgaatcagtggaaaaggcatctttcgtatataagccgagactgtttaccgtattgatgaccaatgcggaaatccctgcacatacaatatcttcgccttcctctgcatatccggcatgtccaagacattcaaagcctaaaaactcgttgtcacggtttctgaaaatcgttatctttgtcataacaactttccctgtcgattacgcattgatcttttcaatcttaacctgtgtaaacgcctgtctgtgaccgtttttcttgtgatagccagtctttctcttgtacttataaacgataacttttttacctctgccctcttttacgacagaagcctctacagaagcgtttgctacatcagaaccaactttgataccgttgtcagatacagctaaaacctgatcaaaagttactttctcaccagcttcttttccgagcttttcaatggtaatgatatcgccttcggatactttgtactgtttaccacctgttgctataattgcgtacatatggcacctcctattatcattactcgccagttatggtgccttctatctgtgattgatacagtatagacggactttcagacctcactgtgcggcatacttcgttactttagcatatattttttgttacgtcaaccattttttacaaatttataaaatatttttatctgaaagcaaaataaaccagcaccagcgctccaagcacgatacggtaccatccaaataccttaaagtcatgtttccgtatataggacatcaaaaagcggatgacaacaatggagacaagaaacgcaaccactgttccaactcccaggatcacaagctctgccccggtaaatgcgaatccaaatttcaagagttttaagaggctcatgccgagcataaccggaactgcaaggtagaacgtgaactccgcaacagctacacgggagacacctatgatcagtccgcctatgatcgttgcaccggaacgtgaagttccaggaatgatggaaagaacctgaaacaatccgatcataaatgcagtctggtaggaaatatccgcaagtgttttgatctttggctctcttgtcttattccagttttcaatcagaataaaggcaacaccataaaagatcagagcgatcgcaatcacaaccggtgtgtgaagatgtgcttcgatataatcgtcaaataatattgtgacagccgctcccggaatacatgctaccactactttaaaccataaagaaaaaatatcttttcttatcacaggcttcgccttatccttaaactggaacggaaacatccggttccagtagaggactacaaccgcaaggatcgcaccaagctgaatgataataaaaaacatttccttaaaggaatcacttgcgtttagctgtaaaaattcgtccactaaaagcatgtgtccggtgctgctgatcgggagccattccgtgattccctccacgattccaagaaaaattacttttaaaatctcaataaaacttaaattcatttttattctctctatactttcttaattttgatgatactcaaatgtccgtaaaatgttccagattgtgtcaggacaaactctcccgcagtgattttttgattttcttccgcgtgacctcaacaagaccgagttttgtcatctcaacgatctgcgttggtaccggatcttttttcagtgccgctccaaaaacatttaaaagttcactctctgccgactttgcttccagattgataaaatcaacaatgacaatccctgaaatattgcgcagccttaactgtcttgcaatttcttctgcagcttcgatatttactttaaggaagttttcctgcatttcctttttggcaatgttttttccggtatttacatcaattaccgtcagagcttccgtcggctggataataaggtatgcacctgactttaaccatactctctccctcaatgcatcgtgaagctgtgatgtgatcccgctaagtgcagataatgaaaccatttcatcttcataatagcggattttaagaccatgtccggtgagtatttcatctaccctggatctcacactgcccccggttacaagctgttttgcaccgacaccatacatgttacagattgtctcaaagatttctctgtcatccgtcaccacttcccccagttctgtttcataaagtccgtttaacatcttctgccacggctgttcctctttatgtaccagagaatagcggatcaaatattttgtgcctgagatgattttttgaacttctgcctcaagctgtgccaattccaaaagcagttcctcttttgatgcctgcgcagcattggtacggatgatcacaccatatggaatctgttctttgcctgaaagaaaatcttctacgatctttaacagcttttctcttttctcttttggcagcttggaagatgcaccgatttttcgttttccagtcgtaaggatcacatattttccggtaaacgtaaggttcgtacttacggaaggatccttcgtctttaatgcttcttttaccacctgaactaaaagttcatcccctgcacaaattgcttttttttctgattgttttttggtaaaaaccggatttttcagctcctgcagcggcaggtaacagttctgtcccggtgcgatgcagacaaaggcagcattcagattttttacaacattttctaccctgcctatataaatatttccaagcacagatgtcccggtcatggattccgtggtcacttcgatcagtttttgtctggcatcacagagtgccgcaatgcggtattcttttttttcgatttctgttgttgtaataataaaacggttcatattacccgatcacttcccccattttcccaagggaaataaatccatctcctgccggatccatggcatagacatccctgcggtgaatctggatcgcattctggtcataagtatatcccattgcctgaaacattgcttctagtacaagttccggctttaggttatccgtacttcctgtggatacttttaaataaaataccggtctgccgtctctttctgacacatcaaatgcatatacaagctgctttaaatccatgactttttcgctttttttcgtctgttttgtgatcagaaattcttctttttccgtaaaatactgacggatgccatctgcaaaagttctaacgtctgcagccggttcatacccttctttaaagtaaaggtcatagtccgccgctgcaaccatggacattgctgtttttgcattgtccggcagctttacatactctgtgacttccacaccttccaccatggtatcattcagtgccttaatagacgcttcgcttgatctggtagaatttacttcaatatcaagatactctccatcactggtgattccgacaccaagcggtgccgcaaaagacatgatctggtgcggggaaaagccttccgagtagcagatatcaatttctgccctgcgcattgccttctgaaaataacgcataatatccagatgtccgataaaacgcatcacaccgtatttacggaatttaatccttatctttatcataatgtcaaccttacattaaccctttcttctttcacattaagtatctcatgtaaaacgttaaatatcttttttaacgctctgccatacatacccctgttttaaactgggcggcaccacatccggagcagcgcatcctgcagtttggagtcacattctcttccatggcattttgccattcgcgttttaagaattctttcgtcacgccggtatcaatgaaatcccatggaaatacttcatcaagtgagcgctctcttttggtgtaaaaatccatatccacgccacattccgcaaatgcatccaaccatctctggtaatcaaaatattcggaccacgcatcaaatatgccgccacgctcataaaccgtgcggatcacatttccgaccttgcggtcaccgcgtgctaatacaccctctaacaccgtcacatcagcttcatgccagttgtatttgatgcttttacggtttaactgctcttttaccgtgtcattgacaactttcgcacgcgcaatatagtcctccggatcatgcatggatgcccactggaacggtgtaaaaggctttggcacaaaaaacgatgttgaaattgtgatctggcatttcccattccgctgatcttttggaatctcataataacgtaccgcaatatcgtttgccagttccgggatcgccttcatatcctcttctgtctcggtcggaagccctaacataaagtaaagctttaccttattccagccaccttcaaatgccattccggcaccttctaagataacctcttttgtaagacctttattgataacatccctgagacgctgggaaccagcctccggtgcaaaggtcagactgcttttcttgatatcctgcacttttcccataacatctaaggaaaatgcatcgatacgcagagatggaagagaaatattgacaccttttcccttaaattcctcaattaaaaatgtcacaagttcctgtaactgtgagtaatcggaagaacttaaagagcttaaagagatctcttcatgtccggttgactttaacatctggtacgcaagtttttttaaccgttccacatctttttcacgtgtcggacggtagaccatacccgcctggcagaaacggcagccacggatacagcctcgctggatctcaagaaccacgcggtcctgtgttgccttgataaatggtacaatcggtttttccggataaactgcctgcgtcatatctgtaacaatctgttttgtgaccgtgcgtggcacatcctcatacaccggttcaaatccggcgatcgttccatcctctttatagcttacttcatataaagatggtacataaataccaggaatctttgcggcctcatgaaaaaaatccttgcgcgaagctccttcctgcttcatttttttgtacagatccagcagtgcatcataggaaatttcgccttctcccatataaaacagatcaaaaaattccgcaatcggttccgggttataggtacatggacctccgccaattaagatcggatcattttccgtcctgtctgctgcctcgattggaatctggcttagatctaagatctgtaagatattggtataacacatctcgtactgtatcgtaattcccaagaaatccgcatcctttaccgcctgttgcgactctaaagaaaataacgggatattctcttcttttaaaattgcatgcagatccgaccatggggaatagacgcgctcacaccagacgtcctctcttttatttaacatatcgtataaaatctggataccaagatgtgacattccaatctcataaacatccgggaaacacatcacaaatcggatatcaaccgtatctttctcttttaccacgctgtttaactcgttaccgatatagcgcgccggtttatcaatcttcatcagtatctcatcggataaagctaattttgtcatttaaaaaaatcctttccatttcttctttcgcgctcaaatttcgctgttcgtcaatcatacatgtatgttgactcacttgcgctcaatgtatcataacataatttttcagatttgtataataatgattatcacagatcatttctgtgatcgtctgcgtgctgtaaccacacaaatccgtatgggtatacatgcagcctaaaaaagctgcaaatatacatacagataaaaaaatgcgcagtttcagtgctgccgcaagccccatttctggtgcagaatcatccacctctctggtctctctcttctgcatcccgttttcctcataaaaagaattgcggatattctgcacatattccctgcgccgttcgactgtctgtctgtccatagaacactccatttctgtgccagtccatctgcataaaattatatgactgatttcatacagcagttctgtgtcctggcactggtttaccataaaaatattatgtataccagtgaccgtttttaagtaaacatcgtttttttattctgatttttgatatcattttatgaatctatggacaaattcataccttgtatttttatttctgtctctgcttttttgtaaaaggtttctggagccatttcagcagcgtattgtcaaggatcattgcaccgattgctgagataaaaagagtcagtaccatcatcacaatacagccgccgacaatgccaccgccgagcacattgacatgcagtttctgtttgaccacaaaatgaagtacgccccagtggatcagcagaatagaataactgtaccggctgatccactgcacaaagaaactgctttttgttttttgggacgcaaggcgctttaccaacaaaaagatagctgccgtaaaacacatcattgtgggcgaattctgataaatataattgacataatcatttccgttccagatccacatacaggtttcaataaatgatagaaatcctgtaaacatgaaaaaattttctacctttctgctgcatttttcagaaagaaaatatccaagtaaaaaagtgcccgcataagaatccaccacaatgccaaacacagagttgattccgtaaagtggtagataggtgtccaatgcacaaattgcaaatacgacccctatcacacccgacaatacggtatcgggaatattatgtacaatataccgcataaacggcgtcagtacatacagccagatgatcacatagaccagccagaaatgaggtgcctccattggagcccccgttaaaatacgcctcaacatcagaatccagtggtccggtctcagccagacaagcccttcctttgccacgatatacagaatgtaatagacaaccagcggaattgcaacttttgtgaaacgtttccggaaaaaattgccgatcgattcattttttaccgggagcaataatgctccgcttaacatgacaaaaagcaggttgcaggacaaaaatataaaattaaagatggtaagcacccggaatgggatgcttccgtattctgtcatcgtggcagccagtgagactgtatgcaccccgatcacaaatacggtcgctatgacgcgcagatcatcgatgtagacctgcctgccgccttttgacagattaccagtcataagttgttttattttttcaaacatggagtctccaattttcattttcaggattttatctgatatacccaaattattttttcatataaactttatctttcgttttgcctttgctgatcagaacttctactttttcagcttttgacaacagccggcttgcggtctttttctctacatccagtaattcagccgcttttgcactgttaatggtatcatgaacagtcagatattgtaatattacctgtattctggcaatttctaattcggacattgattcggacattgatttggacattgattcggacataatctcatttttatcaaatccatcgcggatatgaataattgtattcaaatatgttctgtcatcatccatatcaaattccggtccaggagaaccatttttcttaagttcacgtaatattttgggaatacctgtgccttttttctctgacaaatcaatttctttaaataattctccaatccgtctgttcctgtattttctgcctttgatcctgccttcggcaaatcgctcaagattaatccattttgccaatcccggataattgagtatctggatactgtcgacgtaaatccggatttcaacaggttcctgttcacgatatgatttatgaaaaactgcatttaccagtgcctcttcaagggcattatatggataattaaaaaatcgttctgattccgcctgcccctgaagttttacaactttttcttcaataacatttgtgttaatgtaatctaatgcatcctgaacctgtttccagataggacctgtaaaggttttttcaataaaatcatcggatgcctctgcttcttttgtattaaaccggattaactcaatgtatgatcctgggataaatttttccggatgttctgcaaacattaaaaccccgatatttctaatatccaattctgtatctgtctcatcggcgacttcttcggcaaggagtaatgtctgatattatcaattgttgccttgcgatttacacgatcatcaaacggaacggaattaaatttatcaaacaattctgaaatctcatcctgttttgcatccgtagtcagtgatgcaggacggatccagtatttcaaatttttatccgctttcattcctttttccagataaacagttttaggcgcctgatatggaccactgtcaccagcagaacaccaaagataaatcaaaaaaattccggaattctgataatcaatgatttccattctcggaatatatcttggaacgatctgattgcaatactgaaaaatttcctgttggatggaatccagatcctcttttggtaccccttctaaaggaaataccggcatcccattttcttcttttacaccgatcacaatatatccaccgtttgtattgtcataatcatttgcaaaagcacaaatagaatgaatgatatcatttgggttccatcctgttttatattctacccgatcatgttcaaccacgcggccttttaacagtgtttctatttttaatggtatcattgtaatctctctttcataaatatttgttattcatgatgaacctgcaaaaggacatttacaagtaatttctgcctgtaaatgtccttcgtatattacctctgtgaaagctcctgtgtgatctcctcccacgtaactcccttttccgccatcagcaccatcatatgatacatgaaatcggatatctcatatttgatatcttccggatccggatttttggctgcgatgatgatttctgatgcctcttctcccatcttctttaagatcttatcgagtcctttgtcaaacagatagttcgtgtatgacccctctttcgggtttgccttgcggtctaaaataatcgcatagacatcctctaatactttcagcggatttttctccatatactcctttttgacgatctcattaaagaaacaggagacatttccggtgtgacaggctgcaccgatctgtgatactttcgctaagatcgtatcataatcacagtctgcggtcagtgactttacatactggatatgtccggatgtcatacctttgatccataactcctggcggcttctgctgtaataggtcatctttccgatattgatcgtcgtttcaaaagcctcttcgttcatgtaggcaagcatcaaaacctcatccgtgcggtaatcctgcacaataaccggaaccatgccatccgaatttttctttaaatctgcccattttaatgccggttcgaaattatccatcttgatcccgcctgcagagagctgtgctttcatttccatgatatctgtctcaggatcattgataaaagatccggcaattccgcgtacattttcgcgttttaaggtctcaataattttctcgtaatcgcactcctcaaaatatacgacatacggaacgtctgtaatattttcgattgccgtcaaaacgctggtgtttaaaaccagaagttcgtgaaaatgctcctgcatctcctcctgatgtttgaatacaaaatcaacatttgccacggaaacaaggatgcgctcttttccaaaacggtcgctcgcctctcttgcaatatccatgctgtttgattttgcaccgtttacaataacctgcaggcatccggcataaataaacttcttgacatcctcaaagcggctgatgtttccacctgcgcagactttgatctcgacattgcggttgatatttttgatggtatggatattcttctcgtgttcttcgtcatcgtctgagagatcaaaaatgatgattttatcgataccgctgtcattataaagacgtgccagactgatcacgtcccagcccattggttcaaaattatccatgccttttactgcctgtccattttttaagtaaatggtggcaacaatatttttgtgttccatatttaaaaactctccattcctgcattttcttaacaagccatacacgtttttcttttgtgatatatacctaagacagatttctgcaggaatcgcaagttttcctacaggctgccttttgtggacaacacatccgtgatacgcggatcatagccggttgcttcatctaacgccctcgcaaatgccttgaacattgcttcgatcatatgatggttattgccgccggacaatacacggatatgcagattcatacccgctgcataagaaacggcatagaaaaattctttaaccatctccgtgtccatataccctacgcgctccacagtaaattcgccatcaaaaacaagataaggtctgccggagagatccacggcgcagagcaccagtgtctcatccatcggcaaaatacagcttccaaaacgtttgatgccctttttattttttaacgctttgcggatcgcattaccaagcacgattccggtgtcttcgatcgtgtgatggcagtccacggcaagatccccttccactttgacatccagatcaaaaaaaccatgtctggcaaatccttctaacatatgatcaaaaaagccgatcccagtgtcaatctccgctttaccagttccgtctatattcagattaatcttaatatccgtttcttttgtttttcgtatgtactccgccgttctttccattttaccacattcctctctagtcttcaaatcgtacacggattgaatttgcatgcgccgttaactgttcacattctgcaaactgtacgatatctttataaatcggctctaatgcctctcttgaataagagataatgcttgactttttgataaaatcatccacgctaagcggtgagaaaaattttgcagtcccgttcgtcggcagcacatggtttggaccggcgaaataatcacccaatggttcactggaatattccccgacaaaaattgctcccgcgttgcggatctttgtcatcgtctcaaatggattctttgtgacaagttcaagatgctcggatgcaatctcgttcactgtcgcgatcgcctcgtccatactttctgccactaagatataaccataattatccaaagacttctgaatgatttcttttctggataactgtgccacaaaaccttccacttcttttgatacctgctccgctaaatccctgctcgttgtaacaaggatcgcagatgccatctcgtcatgttctgcctgcgagagaaggtctgctgcaacaaaacgcgggtttgcagtttcatctgctaacaccatgatctcactagggcctgcaatggagtcaatgcttacaaaaccaaatacggctttctttgccagggcaacatagatattaccaggacctacgattttgtctacctttggaacgctttccgtaccaaatgccagcgctgcgatcgcctgtgcaccgccgactttatagatcgcatccacacctgcctcttttgccgcaactaaggtcgccggattgacttttccgtcttttccgggaggtgttgtcataacgatagtttttacacccgcaacctttgccggaacgatgttcataagcacggaggacggataaactgcctttccgcccggtacataaacgccgactttttccaaggcagtcactttctgtcctaaaataatgccggactcctcggaatcaaaccaagaatactggcgctgtttttcatgatatttgcggatatttaccagcgccttgcggatcaccgtaagcagtttttcatccactttttcgtaggcctctttaatctcatcctccgtcacaaggatattctccgcgttgatgtcagctccatcaaaacgctttgtgtaatcaaagatcgctgcatcgcggtttgcccttacattttctatgatctcatttactctgccttcaaattcaccataggaattcgggcttctttttaaaagattttccagtatatttgttcttgcctcttctgtcagttctataattcgcatacttctcctccatttcaaaacatctgttccgtctgtattcaaaacattgctgtggcaaacggtttttgttatcttatatgacggtctttaaatcggaaatcagttttgtaatgcgctcattttccatcttcatgctcacctgattgactaccatgcgggcagaaagcggacaaacttcctctaacaccgacaaaccgttctcacgcagggtggagccggtttctacgatatcgcagataacttcagataagccgacgatcggcgccaactcgattgatccgttcagcttgatgatctccacagtctgatgtttcttattatagaaataatcttttgcaatccgcggatacttggttgcaacgcggatcagttcatgatggtttaacagctcttttgcattttccggtccacagatgcacatgcggcattttccaaatccaagatcaagtacctcgtaaatatttctgccttcctctaagatcgtatcttttccaacgataccaatatctgctgcaccatattcaacatatgtcggcacatccggtcccttcgcaaggaaaaaacggagttttaattcttcatttacaaagatcagttttctggtgtctttgtccttcatctcctcgcaggttatgccgatctgttcaaacatctctaaagttttcttcgccagtcttcccttcccaagggcaaaggttaaatatctcatctcttccatcgtatccgtctccttacataaatgtcacattcacaaagtgattctgctttgcataggtgcgataatcttcttcggtctttgagatatctcttgccatcagctccacatttctgccgtcagtacgcagctccatcgcctttttgatcgcctcactgcgcattttcgaatcataaataataagttctttctgatattgtaccggaatttcgatcttctgtctggaaagtgctgccatcagctggtcaataacgatcgcaaaaccgatggatgctgactcctttccaaagtaagtcagaagttcatcataacggccgccctttacgatcggctcaccgcttccaaacgtgtatcccgcaaaaatgatgccggtatagtactgataattgctgacaattccaagctccacggagacatatttatcaatgccatagatctttaaaacctgatgtaactcctcaaggcgctcaatcgcggctaagatacgcggatattccgaagcatattcctttgccgtctgcaattcgtcagatccggtatacagattgccgagcattccaaacagagcctttaagttatcgtttaagctcagcgtctcagcaaactccgttacaccaaaataatttttgttggaaataagatcatgaagttcttcttcctgttcttcctttaaccctgccgcatctgtcaaaccgcggaaaaattctgcatgaccgacggaaagctgaaactcttttaatcctgcttttttcaggcagtcgatcaccatggcaatgatctccgcgtctgcatctaccgtggaatcgcctaaaagctctgcgccaagctgtgtgctctcttttaatcttccctgatagctgctgttgtttaaaaatgtatttcccatatagcagagacggatcggcatcttctcctcaccaaaatacattgcggcacatcgcgcaatggaaggtgtaatatccggtcgaagtaccaacgtatttccctcccggtcaaaaaacttatacagatccttcgaaggtgtggttccgatctctctgccaaaggtatcaaaaaattcaaatgttggtgtctggattgggtgataaccgtactgtttctgtacttttaataattcatcctgcaaaatcagctttttctcgcattcgtcattgtaaatatccctgacaccttcaggtgtatgtaataactgtcttttcatcaaatctccattccgggacgttatgtgataagtgatttttctgccgtccctgcacacatttttcccttgcactttagtgtgctaccttgctaccacataaaactgctgtttattatattggaaaacaaagggaatgtcaatcccttgccagcaaatctttttgcagcgtatccaagtaaggaaccagtaccgcttttcctttcggaaggaaataatcggattctaattcctcataacggaaactttttcttccaccttcttttgcgcggttccaaaattccaacagctttgcaaggcgcagataataaaattcgttccttgcggtaaaactgatcagaaaaaatgaaattcccccctgcttttcaaagttttccatgaatgttacctgatgttcatggatattctgaagcggaaaggtgtctgtcgcacattcctttgcgtcaaaacacaccgggattccctggacggcgccaatatagtcgacggtacttttctgttcaaaatatgccagcgtaatatgccttgttgccttgtctatattgatgggtgtgatcggcgttggaactttctgaatcagtgcaaggccatttgtcagataagtttcattggtgcggttgatgaactcctctaaggttgaacccctgagtcctcttgagttccaggttgccatgatggtactcctttataaaaataaatgattccaaattttttcgaacactatagtctgaaaacatgcacatgacagaatgtacattcatcggtttataaattttcgatcacattccatgcccgctcaaattcagcaccacatggagccgtaatctccctgccgtcctcaaatacaaagcggcttgcatgaagaagctgtgacgttatccttgcatttttcttaaaatatacattaactccagaatctccatatttatagtctcctatgatcggatgtccgatagacgcaagatgcgcacggatctgatgggatcgcccggtcatcagatgaacttcaaactccgtgtaaccgcccatacagcgaatcggtttatattccgtctcgatcgggagccattctccctcagaaggttttgtcctgcggatcaaaacctgattggacgattcatctttctgcagataacctttcagataagaagcttcttttaccgtcccctttacgatacagcggtaatatttctgaaccgaacgttcctttaaggcttttgccatctcctgaagtccctttaaggtttttccggcagctaacagaccggatgtattgcggtcaagccggttgcagatcgatgggcggaaggtacggaaagaactttccgtcagttcccctttcgcgatcagatatgcaagaatatattcgtttgcggaaatatcttccggttttgtcttctgggaaagcatgccggtcggcttattgataaaaatcacatctttatcttcataaacaaccggaagtttccgttttcctgatgtaaactccctcgaaagtactttaagtgcctcgaattcagaatccggtgtgccgcttccactgaacttctcaaaggtttcatcggaaaaaaacagttttatatcgtcgccctgattcaacttttcggttccgtctgcctttttcccatttaaagtaatattcttttttcggagcattttgtatataaagctgcccggcgcattgccaagcagcttttttaaatatttatcaaagcgttgtcccgcttcgttttcattgattttaaattcacgcataaaattttctttctatttctttttatggatgttgcggatcgtcttttttttcttagcgccagtattctgctggttatttccagacgctgtaatctttttacggctgccggatgtgaccgtccgtctgtcatttttcacgctgtttttgctgtggaaattgtccctgtcattttttgaactgcttctgttggaattgtttcctctgtcatttttcgcgccatttcgatcaaaagaatgttctcttctcggacggatcaggcagtgtttgtcaaatccgatcaagtctgttctgccagcctttgtgagtgcttccaccaccagatcataatttttcgggttccggtactggatcagcgccctctgcatcgctttttcatgtggattgacagcgacataaaccggttccatcgtgcgtggatccaatccggtataatacatacaggttgagatcgtagaaggtgtcggatagaaatcctgtacctgttccggcatgtaaccaagatcgcgcaaaaattcagccagttctactgcttcctttaaagtagaacccggatgggaggacatcaggtatggcactaagtactgttttttgccaagcttttcgttcatgtccttatatgccttcacgaactttttatatacttccacgctcggttttcccatcttctccaataccgcattggagatatgttccggtgcaactttcagctgaccgctgacatggtgctcgcaaagttcacgtaaaaacgtgcggtcttcatcgtaaatcaggtagtcaaaccggataccggaacggataaaaacttttttcacattcgggagctgtcttaatttccggagcagcgacagataatctttgtggtctactttcaaatttttacaaggctgcgggaacagacactgtttatgcggacagacacctttggtaagctgcttgtcacacgccggcgcacggaagtttgcagtcggacctccgacatcgtggatatatcccttaaaatccggttcccagacgatctggtttgcctcggctaaaatcgattcatggcttctggtctggatgatacgcccctgatggaaggtcagtgcacagaaactgcagccgccgtagcagccccggttgctgactaaggaaaatttgacctcctcgatcgccggaacaccgcctgcctcctcataagatggatggtaagttctcatgtaaggaagcgaatatacctgatccatctcactctgtgtcagaggttttgatggcggattctgtaccacaaacattttcccatcatacgtttcaaacaaacgttttgctacgaacggatccgtattgctgtactgcacataaaagctttttgcatattcttttttatccgcaagcagtgcttcataatgcggcaattcgattgcatcgtaaatatcctcacgttttctggtcttgtaaaccgttccgtcaataaatgtgatgtctttgatatctaacccgctatccagagcatctgcgatctctatgatactgtgttcgcccataccataggaaatgatgtctgcaccggagtctaacaggatggaacgttttaatttattcgaccagtaatcgtaatgcgcaagccttcttaaactcgcctcgatcccgccgatgatgatcggtttgtgcttatatgtctgccggatcaagttgcaatagacaaccgtcgcataatcggggcgttttcccatcacgcctcccggtgtgaacgcatcgctctggcgtctctttttagaaacagaataatggtttaccatggaatccatatttcctgcagagacaagaaagccgagccgcggttctcctaaaatattaatagactctttgtcatgccagtccggctgtgcaatgataccgactttatagccatgtgcttctaataaacgcgatatgatggcatgtccaaacgatggatgatcgacataagcgtcaccgcacacataaacaaaatcaagctggtctataccagcctctctcatatcttctttgctgattggtaaaaaaccatttttcatgttgatcctcatttctgtatattgcacagagacagcacagatatctaagctgcatctgcatgttttctttttttctgtctgcctgtcagtgtcggcgcagttcctgtaattctttttcggtcagtggacggtattccccgggagcaagttcatccggcaacaccagtgatcccatctccacacgttttagataagtaaccttctttcccactgcctcaaacatccgctttacctgatggaacctgccttctgtaattgttaacctgatttccgaattgtcacccgaatgcaaaacctctaaaagtgccggttttgcaggcttttcttctcctatgtcaaccccattttcaaaaaggttaacatcttcttctgtgacacgaccgtcgatttttgcatagtaaaccttcgaaacatgcttcgccgggctgagcagatcgtgtgctaatgccccatcatttgtgatgagcagcagtccttctgtatcaatgtcaagtctccccacagggaagaggtcatggcgcgccgtgtcagtcagatagtccatgactgtccggtgcagattgtcctccgttgcagtcacacatcccgccggtttgtgaaacagataatattcatactctgtatatgttaacggattcccccgaaaacagaccgtatcatttttttcatccactttctgttccggtttctttacaacttccccgtttaccgtgacaagccctgatcggatatatttttttacttcgcttctgcttcctgtgccgagttcggtcagtaatttatccagccgcatgctctctccattctctaaaatcttactatatcaaaagccattatttactatatctgtataatattcaaattatgctgcaaatgatgttgtcgaaaaatggcggctcacctaagtgcgcctccttgtctttcccacaaataagaaagcatcggataggaatttaccgaaaactctgttccatctttatcattcagatagattcccatatgaagatggactgcaaaattcccggtcgtgccctccacatcgctgtaaccggtgtcacccataaagccgagaaaagtgcccgccgatactgtttcaccgatctgaaagtcttttgcatactccgccagatgggcataataaaaatatgcaccggacggactccggattccgatccggtagccgccaagacggagccagcctatattttccacaacaccgtcggtcatactgtagaccggatatatgccccgcacattttccgatgccatgatatcggttccctcatgtccgcggtcgccgccaaaagtccggctctgcatccagctattttcaaatacaacgttatcttccggttttcctgcgatctttcccaccggaaaacacaaaaggtcactccagacgcttttgacatatccgtttatctctgtaaattcattgccacgatatttttttgcatctgcgacccgtttcttcaacagcttaggatctgtcatctggcagtccgatgcaaaatacatcgtcaaaagctcacaaaacccttccatatcggatccggcattgttaaaaaaggtattgacctgatcttttgtcagattatggttccgcagattgcgaaatgccgtttcataagaaaaacagtttctcctgtgtgcactctctaaaagttcttctgtcaaaagtacctgaaacactgccatcatacataaaaacacaagcagccacaatctgacttttttcataagaccagtccgtactcccttatttttgcaatattaaatttatgacaaacgtttttatttacttctctttaaaaattccacaatcagtttccatactttttcggtagaagaaatgctgagacgctccttcggtgtatggatatcaaagttattcggtccgaaggaaacgcagtcgagatctgcgatcttgccggataagataccgcactcaagtcctgcatggattgcctcaaacactggctcctcgtggaataattcttcgtatacggcactgattccctcacggatatcagactccgcgcgatactcccatgccggataatccccgcttacagagatctcaccgcctaaaaattcagccagatactctaatttatcttttaattcttcttttcttgtggagacactgcttcgcacagatgcggtcagctcaaggccatctgttgtcagtttcatgattccggtatttaaagaagtctctaccagtccaggcattaccatgctcatatgctgcacgccgtttggcacgttgcgcagataaaagatcacttttgtcatggaagaataagataatacttcatactcccctgttccattctcttttatttcaatgcagacagccggatctgagacagcatactcttttttaaaaatcttttccagttctgtaatataatcggaaagttctgctttttcctcttccggaatgacgatctctgcctcacactcacgcgggattgcattatcttttaagccgcctgcaagtgatacaaccgccagttccattcggtcggaaagatattttaacacacgtcccatcaggatattggcattggcatgttccttatcgatctcactgccggagtgccccccctctaagccagtcacagtcagtcctgcgccatatccctgctgtttctgccatgtgacagggatcacagtatccacagtcataccgccagcacaacttgtcaggaaatgtccttccacatcggaatcaatatttaacatcttatggccttttaacatggaaagatctatgacctctgctccgagcatgccgatctcctcatcaaccgtgatcacagcctcaagtcttggatgcgcaatctccggtgaatccataattgcgaggatataagcaaccgcaacaccatcatcaccgcctaaagtcgtgccttttgcttttaagaaatcgccgtctacataaagctccagaccgtctttctcaaaatcgatctccacgcctttttccttctcacagaccatatccatatgtccctgcatgatgatcgggtctgcactttcatatccggcagatgcctcctgaatgatcacaacattgtttgcctcatcctgatagcactctaaaccatgttcttttgcaaaagaaatcagataatcgctgatctgtctggtatttcttgaaccatgcggaatcgctgccaactcctcaaaatatgcaaatacttttttggattctaactctggtaaatttaatttgttcttcatagatgcctcctgtttctcatatattctaatatgaaaaagaaattaatattcttgtgtatccttatttttatcgtttatattttatttttcccgcaggacgcagtaactgcagcagccgacggactggttctctggtatgagcgggtgcttccctctctgctgccatttgcgattttatccaatatcctgatctactctggttttaccggatatcttgtaaaacttctctatccgcttctacgtctgatcttaccagccagcagaaatggctcttttgtgctgctgtccggttttctgttcggctttccgatgggaagcaaaaactgtgctgaaatgctaaaatgcgggcagttagaatatcaggaagccgaaatactgtttatggtgacaaacaacatcagtcctgtatttatcagcagctatattctctgccaggaacttcatatgccttccctgataccactcagctatctggtaatatttttgccgcctctcattgccggtagactgctctttttctttacagagaaaaagcaatcagtatcaaaccactccaccacatacaaaaagccagcatctggatctcaaataaattttaaaatcatagacgccggcatcatgaacggtttcgaaacactaaccagacttggaggttatattatgctgttttccatgatatcttccatgttccggctgcttccactgccagaaaccacaaaactgatgctcaccggattgacagaaatcacaaacgggatcaaagctgccagccagtcaccccttacacctgcctgccgttatttacttgccatgacttttactgccttcggcggatgttccggtctggcacagaccagttcgatgatcaaaggaaccggtctttccatcaaaaaatatggaatctttaaactgcttatgaccctaattactgctgttctggcatggtctgttgtaactcttgtgtatccgtctgcgtttcttcctgtatgtctgccgtaggattcaattcggcacggttcgttgtaacaacatcaaggaatccctgcagagtactcatatatgcatcactccttgccttagaagaatccatggcatgtgaaattgtactctctaaatttttcaaaatatcgtctgtatactgcatggcacccatacggatattattggcgtcattggttgcattgtctaagatttcctgagcctgtttggttgcgatcataacaacttcatttgcctgtgcatatgcctgctgcataatttcatgctcactgacaagttcatctgtttttacctgtgcctgtgcaatgattgcatccgctttcgcctgcgcatccgctaagattgcttctttattgctgataatcttctgataacgcttgatctcatccggtgtcttgctgcggagttcatttaatagttcttccatagtttcgcggtttacaatgatcttagacggtgcaaaagcctgcgtcttacagccgtcaatatagtcttcaatctcgtctattatctgttcaattctgctggccatagtaaccactccttattttttaatctgatacttatcatatatccggtctataaaacgtgccggcacaaacttggataaatctcctccataagatgcaaattctttcacgattgtagagcttaaataagaatactggagactggttgtcaaaaaaattgtctccacttccggattttccacatgatttgtctgtgcaatctgaagttcatattcaaaatctgttacagcgcgcagccctcttacaatgatcgtcgcatcgatttctctcatataatcgactaaaagaccattaaaacttgtcactgtaacatttggcatggaatctgtcatctccttaatcatactaacacgttcatctaaagaaaacaacgaattttttgcactgttattaagtactccgaccacaagctcgtccacaattctagcagatcgttctataatatctaaatgtcctaacgtcaacggatcaaaacttcccggataaattgcttttttcataggttcctcccatacaaatggatcatgtattttttctattgatttttgatgataaatgcatgttcatttgtcttatacgtctttaatcgtttcaatgtgaatcccatatccggcaaatagtcaaacgctgtatccaacgatgcttcgacgatgatgattccattttcttttaaaagcgaagaatctttcaggtaagaaagtacatcatattcaagttcctgtttatagggaggatccataaaaatgatatcaaaccggtattttccttccatcgctcttaaagctgataaaacatccgaattatataattttgtttcttttgtaaacttggtaaagcggatattgtcctccacgcatgcagcagcttttttattattttcgacaaaaacggcatactgcgcaccgcggctgactgcctcaagtcccatctgtccgcttcctgcaaacagatccaaaaaatagcatccagggatctcatcctgtatgatattaaacaatgtctctttgatacggtctgtggtaggtctggtgtcaagtccttctaccgtttttaaaggaaggcttctcgctgttcctgcaataattctcatactaataaccatgcctttctagtgtaaaatatctttcctatatggatttttcacactgcatacgtttcttctatacatttttttaacagagaaagtgcgctttctgtggcactctttcttacatccatgcggctaccggaaaacatatgacgctccgtcactgtctttccattcagataacagccgataaacaccagcccgaccgggcattctttcgttcccccatctggtccggcaacacctgtcacggatactgccgccattgttgcagccgtttttgctgcagaagcagccatatccgccgctgtttcactgcttaccacgccataggtatcgattgtttccggtgcaacatgtatcattttaacttttgcttcatttgaatatgtcacatacccctctgtaaaaaactctgagattcccggaacattgatcagcgtggacgcgatcatcccacccgtggcggactccgctgttgtaattgtaatttgatatttttttaacaaaccataaatggaatattccagcggttcctgtactgcacttttgccggtacaggaatcactggaatcatatacatgttcagccaactgctattctcctatttctgttcttttaaaacatttttatttttggcaatataatcgatcagtgatacgactgtcagcgccaaagcaatgtatgtaagaaccgtgccaagcactgcaaagaacggatttggaatatctaagatcagcacaatcaccataagcatctggaaaaccgttttaaattttccccaataacttgcagcaattacaattccattatctgcagcgaccagacgaaatccactgatgataaattctctcgcaatgataatgatgacaatccaggctgcaagctgtcctttctcaatcagacagatcattgcagagcatacaagcagcttgtctgccagaggatccataaattttccgaaatcagtaaccagattgtactttcttgcaatttttccatccagcatgtcggtaagacttgcaatgataaaaatagctactgcaatataattgccataaccttcaaaatacggagcaagcataaagaaaacaaaaaacggaatcaatatcatacgcattaccgtcagtttatttggtaaattcataatttacactctccatttctgcacaataaattttaaatactgctagatcaattctccaatcaggtcatactcataggcgcctgtcacacgtactttcgcgatatcgcccgtcatgagttcttcatctgtattaataaaaatataaccatctacatccggtgcatcacggtaagttcttccaacataagcattttcatcactcactttcccttcaatgaaaacgtataactctctgcctttcatggtctcatttttatcaaaaataatctcttcctgtaattccatgacatctgcctgccagtcttttttcagatcttcatccacctgattggtaaactctgcagcaggcgttccctcctccggtgaataggtaaaagcaccaagacggtcaaattccatgtcattgataaactgcatcagttcctcatgcatttcctgtgtttcacccgggaaaccacagatcagcgtcgtacgcagtgtaatgtccggaatgcgttcacgcagatgcgtaatgatctttacaagatctgcattactcgttcttcgtcccatgcgttttaatatggtatcatttgcatgctggatcgggatatccagataatggcatactttctgattgcggatcatggcatcgatcagaccttcgtatatttcttccggataacagtacataatacggatccagaacaggtcttcgatcttgtttaactcatctaataaacggtgcagtgacttttcaccatagagatcaactccgtagagtgtggtctcctgtgccaccaggatgagttcttttgctcctgcagcaaccagttcttttgcctgttcgatcagatcttccatcggaacactgcggtaatttccgcggatatacggaataatgcagtatgtgcagcgcttgttgcatccctctgcgatctttaaataagcaaaatgtccgcctgttgtcacagaacgtttggtgtgcagtgtcggcaatccctctaaggtcttgaaattctcataatgtttgccctctaaggactgatgcactgcgtttacaatatcctcataggaattcgttccaagaattgcatccacttccgggatttcttttacgatttcttctttataacgctgtgcaaggcatccggtcacgatcagagactttaatctggcttcttttttcagttctgccatctcaagaatcgtattgatactttcttcttttgcatcattgataaagcagcaggtattgacaatgataatgtctgcttcctgctcatcatctgtcatttcgattccatcatctcttaacatgccaagcataaactctgtgtcgaccagattcttgtcacatccaagtgatacaaataaaagttttaaattattcttcatccgatgtctccggtaaaatctttacctttccttcgtaaagttcttctactgcgatggataatggtttcgggcacacttttttctctgccatcggctcatctcctgcaatgatctggcgtgctctttttgcagctgcaatcacaatggaataacggctgtttacaaccggctcctcaccaatttccacaccgtcgtttactactttcattaattctacataagatggatgtatcatgataattcccctttctttgcgcattgcgcatatggcggtctcccgctcttagattcttatatttatgttacagatttttatctgtttcatggacagactattttgaaaatgcttttagttcattccgcatttcctgtattgctgactcattacggtttacacggtaatgttcattctgaatgatctgatgaacttcttccacacagtcttctaacacgtcattgactaccagatagtcataggactcaattccctccgcctcttcaacggctcttgcaagtcttgactcgatcacgtccatcgtctcggttcctctgcctatcagacgattttttaattcttcggcactcggcggtgtcacaaacaaaagcaatgtatccgggaatttttctttgacttttaatgctccctggatctcgatctctaagatgacatcttttcctgcctctaactgttcttccacatatgccttcggcgtgccataataattgccgacgaactgcgcatattcgatcagtgcatcttcttttatcatctgctcaaactgctcttttgtgcggaaaaaatattccacaccatccgtttcacccggtcttggatttcttgtcgtcgccgaaatggataatgcatagctgtcagcatattttttcattaattctttcatgatggttccttttcccgagccggaaaatccggataccacggtaaggattcctctattctttcgtatcatcatatacctctgtggcattgccattaaatctgccggcaagcgtctccggctgcaatgctgataaaatgattttattattttctgtaaaaatgacgcttttggtcctgcgtccctgtgttgcatcgatcagattttcctgttcttttcccttttgcaccattcgctttgccggtgccgaatctgaagatacaatgcagacaatcttatcggtattgaccatattgccaaatccaatattcattagctttgccatataccacctgtccctattctatattctgaatctgttccctgaccttttcaatatccgtctttaaactgataccgatatcagaaattgcaagatcattggttttagaaagaatggtatttgcctcgcggttcatctcctgcgcaataaagtcaagttttcttcccacactgccaccagcttccaaggtatctttggtactcttaatgtggctgcgcagtctgactgtctcttcatcaacacagatcttatctgcaaagatcgttacctccgtcgcaattcttgcatcatcgatctgacggtctcctagcagttctgccaccttagcctctaaccgttctttgtactccttaatgattacaggggagcgctcctcaatgaaatccacataggataacatgccatcaagtttctcgcataaatctttctttaaatgctcgccttccctgatcctgctctccacaaactgctctgccgcaccgcggatcgctttttcaagtccgagccacagagatttctcatctatgccctgttcctccatcgtaaacacgtccgggtactttgaaagcgtactcacacggatatcattatcaagtccgaacttttctgccatactgttcagataagtcagatactgggctgcaagtgcttcattatatttcaatgaaacattgtcctgcgtataatcttcgcagttgataaaaatatcaaccttaccgcgctccatatactcttttaacagcgtacggatcgcactctcgaagaaattcagctttttaggcatcttgatattgacatcgagataacggtgatttacggcttttatctctaccgtaaacttgcggttctcatccgcaaattcacaccggccaaaaccggtcatactttttatcatatttctctccgtttctgcaaaatatcctgtcacgtaaaaatcacttatgcatcacggtttcatctctttctcgtatgcataagtgattttattataaagcgaatttgatttcaagtcaatatcccggtttttttaatttcttactgttcatatggaagtaattccgcaagatagcctttctttttgagtgcttcctctatctcatctaacacttcttcactctcagcgctgatcttatgaaaatgatatccggacgtcacattgagaagtggtgtcgattttcctgtctttaaatcatccataaagttctgcacatctcgcctgcttttgatatttagcggagcatctaatttcccataaacgcggtgattgaccatgacattgaccacacatcccccaagatcaacgatcgtagtcagttcatcctccacctgttcattggtatggcatactttaaatatcctgactgcctgttttggttcatccagcagataacctcttgcagtagaaataatcggatacccctgtgtgcggagaagtgcaatatcctgcaccacgacctgtctgctgacaccggttttttttccaattgccgtgccggataccggtgtatctgtatcacgtatcatagacaggatttcttttcttctgtctgctccggtcatttctttttccatttgcgatcctctcctttttgactctgcatttattttagctgaatctgtctatttttacaagcgttactgaagggaatctgttactttcaagtgtttcaggctgatatctaagatcggtgctgaatgtgtcagggcaccgctggaaacataatccactccgagtgctgtgatcgttttgatattctcttttgtgatatttccggagcactctgtttttgctctgccgtcgatcagccggattgcctccgacatctgttccggtgtcatgttatcgagcatgataatatccgcacctgcttccacggcttcttttaccatgtcaagattttctgtctctacctcgatcttacggacaaacggagcatatgcttttgcagcaagaatagcttcttttacaccgcctgccgcatcaatatgattatctttgagcagaacaccgtccgataaattgtaacgatgattctgtccgcctcccacacatacggcatatttctcgaaaatacgcatgcatggtgttgtctttcttgtatcaagtaatgttgtgctgctgccctctaataaccgtgcaacctgatgtgtatatgttgcaataccacttaaacgctgcagataattaagagctgtacgctctccggataaaagaacccgcacgtcaccttttaccgtcgcaaggagctgtcctttttttacagcatcaccgtcttttacttccctgccatcctgatttttcgcccactcaacttttgtggacgcatctaacatggtaaatacacgttcaaataccggaagtccggcgatcacgccgtcctgtttacagatcagttccacctctccggccctgtattccggcatcactgcgtttgtggatacgtcctcactgtgaatatcttcctctaatgcaagacggatatatttatcagcaacaagctgcatggtaattggattcaaattcatgatcttcatttcctttctcttcattttgtatttttactgctgcacgttttgcaaaaacaagactctctaacaggctgttgcttgcaagccgattctttccgtgaactccgttgcagctcgtctccccgactgcatatagatttggcatcgttgtcgcagaatcgcggttcacatggacaccgcccataaaataatgctgtgccggcacgataggcgccggttcttttaaaagatcatacccttcttcgagacatttttcataaatgtgcggaaaatgcttcaaaatgatttcctttggaacatgtgcaaatgagatccattcatactccacaccttcttttttcatttcttcctgtattgcttttgtcacaacatcacgcggcagaagttcattgacaaaccgttctcctttgtgattgagaagaactgcgccttctccccttgctgattccgagatcaggaaactccttccaggctttttactgtaaaggcatgttgggtggatctgtacatagtccatatgttcaagttccacaccgtgttcttttgcgatcctgcatgcatcaccggtcagtattgggaaattggtggaatgctcataaagacccccgattcctccggttgccataattgtattgtctgcatgaatatgcagcgtttcaccttcttttgtttctgcggccataccggtgcatttgccaccatccaccaaaatatctgtcatggtcgtatactctaagatggtcacattcgaacatttttttacatgtgatagtagtgtcgttgtgatctcctttccggtaatatcctcatggaagcagatcctcggccgggaatgagctccctccctggtataggcaaggcttccatccggattttttgcaaaacggacaccaaaattcaacaggtcgttgatcacatcccggctggaacgtatcataatatcaacgctctcctttcgattttcataatgtccggcccgcatggtatcttcaaagtacgaatcgtaatcagattcatcccgcagtacacagattcctccctgtgccagcatggagtcacagctttccaaatctttttttgaaagcatcagaatattcatttcttccggcagattcaaagccgcataaagtcctgccacaccacatcctgcaatcactacatcataatacagatttttcatatttgacctcatttctgtgccgccatcggaaatgtttcgaattccgttttaacacatgttgcttttattttccggcaagttctaacattcttgccagcgcattttttgcagcgccttccgtttccggtcttgcatggatctcattttcccctgtttttaacacatgaagcactttttccggcgtgatttttttcatattcacacaggtcggtgttgtttccggaaaataaaactctgcatccggtctgcgctcttttaattttgtaagaacaccgcactccgtgccaatgataaattctttgtcgctgctctccccggcaaaattgataattccgcttgtcgatccgataaaatctgcgatttcaataattttatgattgcattccgggtgaaccagtacttttgcatccggatgctctgcctttaaatcaagcaattcctctacctgcataaattcatgtacaatacaaaatccttcattgtaaatgaattctttttccggcaccgctgcggcgacaaaatgtgccagattccggtccgggataaataaaatatgtttattcggcagattttttacaatctttaccgcatttgcagaagttacacagacatccgaccacgatttgatctcctgtgtcgagttgatataacacacgaccgcaaggtcatcgtactggtctctcgcggcctgtacggtttcttttgttaccatatgtgccatcgggcagtccgcagcaagatccggcatcagtactgttttatccggatttaacaattttgcactctcgcccataaatgtcacgccacagagtacgatcgtcttatttgcaagctctgttgcctttttactcaggaaataagaatctccgatgtaatcggcaagtgcctggacttccggtcttacataataatgtgccaggatcacggcatctcttttctttttccactcttctaattcttccaaacttatcatacgccctcttaactctctctcaaattttttgcccattcatttcagatttttaatgaaacttttcgtagtataccacttatcattacatatgacaagacacatgtttaaaatcatgtaaagttttctgcttttatttttcaaagaaatgttttgtacttctgaaacaatacataattcattctgtttcaagacatattaaacaacagaatgcatgttccgcattctatctattgcgaatataaaaatcatgaaaaagagggattctatatgttaaacggagatactgtaaaattattgcgggaatgtaatgccggcacaaaaatggctgtttattccatggatgagatctgtgataaaatttcggatgcagatttcaaaaatgtcatcatggcatccaaagaaaaacacgagcgtcttggaaatgagatccatgcacagttggaaaaatgtgatgatccggtcaaagaaccgaatgcgcttgcaaagggaatgtcctggctgaaaacaaatgccaagttagcagttgaggaatgtgatgctgtgtgtgctgatcttttgaccgaaggctgcaatatgggtgtcaaatcactctgccgctattataatcagtatgcggccgcggacaaacaggcccagggattttgcaaagaactgatccatcttgaggaaaatcttgccaaagaaatacgatgttatctttaacagaaaaactgccacaggcacaaaacaaaaaagacagtaacaacttactttcgattgttactgtctttttattcggttatttacagtcccgtgttttccggtaaatgtgttatcttccttttaccacaaattcacggatttcctccatcacagtatcatcttcctcatgtatggtcagtgtcagaggttttgacagatccatcgtacagactccaatgattgattttccgtctacgatatatctgccttttgcaaggtcaaacgctcctttatgaccactcagaatatgacacagcttctttgctttttccggtgcatcgatcaatacttctacctgtttcaaaacaaaatcctcctgttttgttcttgtatagatatagtattccacaattttccaccggttattcattattcggcaagcaatgcctcgatttcatcaagcacttccccaaatacatccagtgcctcctggattggctttggtgtttcaaggttgacaccggcgatcttaagcagctcaaccggagaggcagaacagccaccggataaaaacttcttataacgttctaccgcaggtgctccctcttttaagattccatgtgccagtgcaactgccgaagaaaatcccgttgcatactgatatacatagaaattatagtaaaaatgagggattcttgcccattcgtaggcaatctcagaatctgataccatatccagtccaaaatatttgcagtttaagtcataatataatttatttaacgtctcagcggtcaggctctctccctcttccaccatcttattgcttaacatttcatattcagcaaacatagtctgacggtaaacagttcccttaaagctgtcaagataatggttgagcagatatgcacgctcctttttatcagttgtatttttcagcaaatactccattaaaagcacttcgttacaggtagatgccacctctgcaacaaagatcttatactgggagtaaatgtatggctgactggaatttgaataataggaatgcatcgcatgtcccatttcatgtgccagcgtaaacatattatcaagggtatcattatgatttaacagcacatatggatgtgaaccataagcccctgcagaataagctccgcttctctttccctcgttctcataaacatcgatccagcggctttcaaatccctcttttacctttgcgacgtattcttccccaagtggtgctaatgcctttaacacggtttctttcgcttcttcaaaagaaatcttctttgcggcatctgcgatcattggtgtgtaaacgtcgtacatatgcagttcgtccacgccaaggcattttttgcggagacgtacataacggtgcattttatccatattcttattgatcgtatcgatcagattatgataaacagtcggagaaacattgttagcatccactgcggcttccagtgttgaatgatagtgtctcgcatttgcatagaaaacctgctgttttacctgaccattatataatgcagcaagtgtgtttgcatactgtttgtacacaccataaaatccctcaaatgcatccttgcgcacacggcggtctgccgactcctcaaacggaacgaaattaccatgggacagtcttacggtatctccctcttcatctttgatctccgggaatacaaaatcagcgttgttgatgatggaatatacctgtccggatgtctccgccatatcgcctgtcatcgctaccagtttttccatttcagcagaaagtgtatgtgccttggtacgctcgatttcctcgatctgtttacggtaaagttctaactctggaagttctttatagtacccttccagaacagcctcatccattgcaaggatctccggaacgataaatgcagtctggcttgacaccttcgtcagcatagaatacattttctgggacattgcctgatgtgccgtatttttctggtcttcatcaaacagacgctctgcataattaaaatcataatccagtttttcctctgccttagctgcgcgttctaatacaaataacagattttgcgcacaagcagctactttaccttccatctttccgatttcatccaggatcttgtcaatctcatccagatcttttttccaatcctcgtcggacgcatacatatcttttaaattccatgtatattcttcttttacttcgcttcgttttaacaattcttttgccattgtaaacctccatatttttactgccgggaaatgattccagcactctctaatttacgctctgcaaaagaatttgtaaagggaaatattgatgttttattatctatttcctattcggtgcaaggaactgattatagaaattattcaacgcatccggttctttgctgtttccgattccgtgagtttccacatattgtttcatctgtttgatcgtttcctttgaaaatacataggtttccaccggagtatcatgatctatgttatttaatgcgctttccagtgctgccttgtattccggatcgactttccagatagaattatcttcaagtccgccttcttcaaacgatttgttataatatttgctgttgatgaaacgggtaactccggccagatccatctgtgtgagttttttcggtgtggtatcggtcacatgcaccatgatctgtttcacataagtatttcctgtatggtcaactacagtcagattttccgatgcggcaaaatcatgctgcagatttgtaaattcttctgtccgatagtccggtatcgtaaaggatgtgaaaacttccggatcactcggtgccggattggttcccggtaaaatcggacttccatcttcccggtcggttgccgttgcatggcttaagatttcttcttccgtgataaaaccactctgtgcctgctctaaggtataatagagatcctgtgcctgaatccacgggcagtcgtcccagacagcataaagtgtgatctctccaccatcttctgccacaaggttccgaacggcatctccggctttccactgtgggataaaggtgtctttgccatcttctaaggaccagcccataaatacagatgcatagacttttttctttggctcctcggctttcttattttcctcgatgtcttcttcctctaagtcattgagagcatcaatatcttcggcatcatctttattctcttttgtcacggcaactttttcattctgatccgtatcgtctgttacatcaggattgtctgtatcatctgattcatcagaattatctgccatttctgcctcgtctgcttcatcggaactgtctgccatttctgcatcgtctgattcatcagagttgtctgcagtttctgcattgcctgcttcttccacagcattcatggaattctgtgcgtctgcatctgaattacctgcatccgaatcatctccattgttttcggaatcctcatcctctgaattaccggcaccctctgggtcttccgcattatccggatcttcagtatcttcgatttcttccgtttcctcttcatatccatccatcattgcctttggaatcactccggcaataacatcctctgtcacgttttgtccatccagtgtatatttcacataggctgctgttccgtctgcattccatacatccggtagcgttacgtcttcatcatacgttgcttcaatatcattgatatgtccggctccaccgttcggatcaaaatggatcgtatatttatttgcctctgcattggctgtcatcgtgacatttccggccggcatcgtaaatacaaacttcttagcatctacggtctgctccccaccggatccgcctttataatttcctttccagtttaaccagtgatagccttcttttactgccgcatcgatcgtgacactctgtccatagcggtacgatccacctccggtcgtcttttcaatgccggttctggcatttaatgttacattatatagatgtctttcataataataatcaatgaccatctttccatctgcagttaccgctttcgtctgtgttttcgggctgtcaaaaccggtgtatgtctttactgcaggagtaaccttgcttccaatctgtgcttttttcgtctctgtttcggcaagttcatagtttttatcgtcatggtcagatgcaattccggttgttttctgtttccagtgatgaacggtataaacagcttcatccaacactccggtaagagttaaggtcatgttataagcaggcatgcttctctcataggcataggttttatcattcacataatcagatgtaaccttacagtttgtcgaaacaccagtcttttcattgagatccgtccacatgctgaacacgcagccggtattaaaggtcggtgtggaaacaatgtttgcattacacggcaattcatacgatgccatgtaataatcaccagatgataccgtgctgctactgtttactgtgccaccggcaccagtgatcgccgtcccattattaaatacctgtgttacagctttattgaccgtggttttg

SEQ ID NO: 5140 - DNA, 23242 bp, Unknown
  gut microbiota DNA sequence
gtggacagcagggagataagggtatcatccgcactgcagccggagaattccaggtagaggatacgatcaaattacttggcggaaaagtaggacatgtcggaaagatgatctccggtatgatgaaaacaggggatgaggcagatctttcggtagatgcagcactccgtgcaaagacctgtaagaaccattccgcaacacatttactgcagaaagcattgcgtgaagtattaggaacccacgtagagcaggcaggttcctatcaggatggcgagcgtacccgtttcgatttcagccattttgcagcaatgacaccggaggaacttgaaaaagtagaaaaaatcgtcaatgataagatcgcagaggcaattccggtacgcacagatgtgatgactgtggatgaggcgaaaaagacaggagccatggcgttatttggcgaaaaatacggtgagactgtccgtgtggtatccatgggagatttttccaaagaattctgtggtggtactcatgtaaagaatacatccgaaatagcagcattcaagattatctctgaaaatggtgttgcagcaggcgtccgcagaatcgaggcactgaccggagacaacgtatttgcttactatcgcaatttagagaaagaacttttagaggcagcgaaagcggcaaaggcaacaccggcgacattaacagagaaaatcgagcatatgcaggcagaaatcaaagcactgaccagcgaaaacgagtccttaaagagcaaggcagcaaaagaggcgctcggagatgtcatggatcagattgtggaagtaaaaggtgtgaaattacttgcttctgccgtagacggtgtagatatgaacggtctgcgtgatcttggagaccagttaaaagaacagcttggcgaaggcgtgatcgtacttgcttcttcctgtgaaggaaaagtaaatctgatcgttatggcaacggatgcagcaatgaaacagggagcacatgcaggaaacctgatcaggagcattgccggcaaagtcggcggtggcggcggcggacgtccaaatatggcacaggcgggaggcaaaaatccggctggtattttggaggcgatcgcagaggcaaaaacagcacttgaggcacagctttcctaaaagctgtttagcatgattgtcccgcaactgaagaatcacggaagatgacagctttttagctatggaggcaaaagatggataaagaaatggaatttaaaaataagagtattaaagaaaaggtaaacggaagctttgaaatgatcatagttttatatgtggtcagcgtggcgtttgcagtatttttaatgtttgcagtaaaaattgttccgtctgcaacagagtattttgtgcttgccggaggtattgttgtgcttgcgattataacagtctgcagtattctggcaacattgaaacgggctaagatgctgatacactatattgtagaaccggtcagggaactaagcagtgtggcagaaaaaatctctggtggagaacttgatattgaaattgcttatcagtcggaggatgagatcggagaacttgcagaagattttcgcaaaacagcaactacgctgcaacggattataggagatcttaatcatattctggatgcatttgcaaaaggtgattatacggtaaaatccggatgcagggatgcttatgtgggagaatttgatacggtgcatgcaaaactgattgcaacaacagaacatgttagtgatgctttaaaatcaatccgtgaatcttcgaatcaggtggcacagggatccgaccagcttgcagtcagcgcacaggatcttgccaaaaatgcaacggatcaggcagtggccgttgattctttagcacagagcgtttcagaaatcacagaacagattcttggaacaagtaagtcgattgatattgtacatgataaagcgaaagacgttggaacaacagcagcggtaagccagcagaagatgacagaactgacagaggcaatggagcgtatttccgtgacatccaaggaaatcggacaggttatcgaagaaattgagagtattgcatcacagacaaatctgttgtccttaaatgcatctattgaggcagcaagagccggtgaggcaggaaaaggatttgcagttgttgcagagcagatccgtatgcttgctgagagcagtgcaaattctgcagatacgtcaaaacagcttttgacagagaaccagaatgaagtagaacacggtaatcaggtgacacagcagacggcagaatctctgacggatgttctgaacgaactggatgctattgtgggtgaggtagcaacgatccgtacggcatctgatcgtgaggcagcctttgtaaaagagatcgaagacagcacgaaacaaatcagcgacgcaatccagagcaactctgcagcatcggaagaaacatctgctaccagtgaagaactttctgcagaagcagattccttagagggccttgtagagcgttttaaactgcgttaaatgtttgtttaatacagaggagagaaaatgcagatgaaaataaaggaaaagatgattgctgtggttatggcatttgcaatgatgtttacgtttatttttgcaggtgaaagcagtgaagtaatcgctgctgcgaaaacaaaagcattagagataaatgttgattttgccaggaatgcagcaagtggagatgacagcgggatatatgtaaaaaacctgatttccaataaaaaaattacttttggaaagacttatgtatttcagacaaaaatttatgtgccagccgtttatatgaaaactggaagaatatgggtaaaacctacagttaatttttttacaggcaaaaatggcgatacatatgccggaatggcgcagtcttcaaaagaaggatattcttatgataagaattcgaaagaagtaaaaaaatatggtgatttttatgttgtcaatgtgaaaataccattggataactgtgacaggatttctgcatcaaaaggaagtgtgtatggacatctgttcatctctggttttaataaggcatataagggaagtatttatgttgatgatgtgacacttactgtagataagaaatcagttgtaaagcaaaattatgagaatggaaaaaacggtggatgctggtattatcttaacagatcagaaaaggaatatacacctgctgttgtttcattttcaggaaagacattggatgtgactaagacatcgcttactataaaaaagggtaaaaaagcgacgatcaaagccactgcaatgccaaaaacaaaaataacatatcagtctaagaacaagaaagtcgctacagtaaacagtaaaggtgttgtccggggcattcggaaaggaaagacaaccattcttgtcacagcgaatgggaaaactgttaaagttcagattaccgtaaaataatttcaaataaaaatctgaaattatttcaaaaataggttgacgaaccgggaaaatatgttataatactatatagtgcaataaatattacccaaacagttgaatatgcacaatacgcaactggagggaggttaggtgtgagataatgtctagtgtaattgtaaaagaaaacgagactttagatagcgctttacgtcgtttcaagagaaactgcgcaaaagcaggtatccagcaggagattcgtaaaagagaacactacgagaaaccaagcgtaaaacgtaagaaaaaatctgaagcagctagaaaaagaaaatacaactaataattagttgtagtgcaaaaagactaccgcatgtgtggtagtctttttttttctgagtgaggttatttaccagatatattttattgcgataataagtctattcgtaaggtggataatctttagaaatatcgtggagcaaagggcatagtattgcagaaatgcataaatatgtttataatatgagaaaagatgtatgaaatacgaatttaagatagagacagaatatacgaaatgagtagaatggagatgatattttatgattaatttaaaaaactgccgggtaattatccgtgaacagaaaaaaaacagtgtacttgcagacacggtaattcttggtcataatctgctgacaaatatcatcaaagtgcgggcgagtgcgatggcatatcggccgaaagaaccagtgggactgcttgtttttctggagaacaaaatatattcttatttaggtaccgtacagggggcggtgatcgcaaacgaaatgtcgattgcgctatacgatgaagaacagaaaaaaggcagaaaatttgagcgttatgagattgaagcatctggcaagatcgaaggtgtcaggataaaaaataacatgataacgctccataagccgataccggttaccatcaaaaatatgagcgcaaatggtgtactgtttaaaggaatttccggctgtctggacgttggaatgcagctacagctttatatggatgtaactgattcaggaatgcgttatgagtataaagtggttcgtaagcagaacagcaatccggagaccgaagagtatggttgtaaaatggttgcgaaaaagaaatagcagccatgggaaattattttgaaaagatacgaaaaaaggaaccgtaaaatatgaaaaacagttaacaaactgaaaaattcatattttcacggttcttttttaattaataaccgaaagattctccaatcaaaagtactttgatacgtcctctgattccacttcttctggtgatgacaacctgattacagatacagtccggagaaagacagtctgcgcaggcaccggttatggcacaaggtgtttttttgtcaagacggatacagttttgtgctgtggcaacattatgtacacggctcagggcctcgtctacatttgcggcaattttattcattccagctaaaataacaacagtttccggaccatagatcagtgcggcaacacggtttccggttccatcgatgttgacaagctcgccaccggttgtgattgcattggtactcataaaatatacgtcgctggaaagagcgtcgtgatacattttttttgtttcatctggtgtttttgcggttgagcggtcgatcagatggatggaaggatcatggcggagcgctgtcagcatgccggtctcctctaaggtcatggagccgccgaaagatacggtctgcccatcttttaagaatgaaaatgcaagtttttctgcgtcttctacggtcgggcagtagtagccttccatctggcgtttttcaaggtttttgatcactgttgcagcaagtgtttcatggtatttgcttttgattgtatccatacatgtactcctttttatcgtatttgacattggatcgcactttggcagtctcaatgtcactgtgtgcttcttttagtatagcacatattcttgacttttgggacaggatagataaaataaaagagttggaaatggaggaatactatgagtaaaaacctgaaaaagatgatttcatattataagccgtatctgggagtgttctgggcagatatgttttttgcaacggtatctgcggcggtcgcgcttgtgatcccgcttgtgatccgttatgtgacatctacattaatctatatggaaccgcaggcgattttaggacagatccgttggattgcgcttatgttattcgcactggtggcggtagactgttacagccgtttttttattgcaaatcaggggcatgtgatgggcgctaagatcgagtatgacatgcgggcggagatttttgcacattttcagaagctgtcattttccttttatgatgatcagaaggttgggcagctgatgtcccgtattacgacggatttatttgatatcacagaactgatgcaccatggaccggaaaacattatcctttccctgatcaaaattattggtgcgttcgtgatcttaatgagtattaaaccggcacttgcacttgccgcatttgcagtgctgccgttcatgtttctgtttgcctattacatgaacggaaaaatgcgccgtgcgtttcgcagcaaccgcgagcggatcgccgatatcaatgcacagatcgaggataatttgtccgggatccgtgtggtaaagtcatttgcgaatgaggatatcgaaaaagaaaaattccgtcagggaaacgaaggctttctgcgcgcaaaaaagaacagttattattatatgggaagtttctcggcaggacttggtacttttacgaccctgatccaggtaaatgtcatacttgcgggtgtcattctgatcgcaaagggaagtgtggatatcagtgatctggtcacatttttgctttatatcagcgtgtttacagagccggtgcggacactgattgattttacggaacagtttcagaacggatataccgggtttgaacgttttcaggagatcatggcgatcgaaccggatattgcagataaagaggatgcaaaagagctggtcaatgtcaaaggcgatatcagctttgaggatgtatctttccagtatgaggaaaatacggaatgtgtgttaaatcatattaacctgaacgttccggcgggggcttatatggcacttgtggggtcgtcaggagccggaaagagtacactgtgttcactgattccgaggttttatgatgtgacggcaggagcagttaagattgatggctgcgatgtccgggatatcaggttaaagagcctgcgcgaccatatcggtatcgtacagcaggatgtgtatctgtttgtcggaaccgtttttgataatatccgttatggaaaaccggatgcaacacgtgaggaagtgattgaagcggcgaaaaatgccaatgcacacgattttatcatgtcgctgccaaatgggtatgaaacagatatcggacagcggggaatcaagctttccggcgggcagaaacagcgtttgtccattgcaagggtatttttaaagaatccaccgatcctgatctttgatgaagcgacgagtgcacttgacaatgaaagtgagaaagtcgtgcaggattctctggaaaaactggcaaagaatcgtacaacatttgtgatcgcacaccggctttccacaatcaaaaatgcacagcgaatcctggttttgacggaggagggcattgcggaggaaggaacgcatgaggaactgttagaaaaaggcggtgtgtatgaaaaactgtatcagatgcagtttcataaataagagtgctgtgtagaagagaagtgtatagcgtaaaatataaaagtttcatgaaatccatgcaaaaatttgcaaaagaggaaaaactagagtaaaatagtagtgtttgtgaagggagagataagacaatgacaaaaattgatattatatctggtttccttggagccggaaaaacaacatttattaaaaaaatgatcgaggaagtttttaagggcgagaagatcgttctgattgagaacgaatttggtgaagtcggcattgacggaggatttttaaaggatgcaggaattgagatcacagagatgaattccggatgcatctgctgttccttagtaggcgattttggtaaaaacttacatgaagtcatcgagaagttccatccggaccgtattttgatcgagccgtccggtgttggtaaattatccgatgttatgaaatctgtcatcgacgtggaaaaagacgaggatgtcaaattaaacggactgatcacggttgtaaatgcattaaaggcaagcaaacagatgaaagcatttggtgaatttttcaacaaccagatcgaatatgcgacaacggttgtcttaagcagaagccagaaggcaacaccagagcagttagagctgtgtgtaaaacagatccaggcattaaatccgaaagctgctgttatcacaactccatgggatgagatcaaaggcgaacagatcttaaaagtagtggagggacaggactctctggaagtaaaacttctcgcagagcagcatgcaaaagaggaagctttagaacatgagcatgagcatcatcatgaccacgaccacgaggagcatgacgagaactgcacctgtggctgccatgatcatgaccatgatcacgaagaacatgaacatcaccatgaccatgatcacgaccatgatcacgaagaacatgaacatcaccatgaccatgatcacgaccacgatcatgaggagcatgacgagaactgcacctgcggctgccatgatcatcatcaccatcatcatgcagatgagatatttacaagctggggcaaggagacacctcataagtttacaaaagagcagattgaggaagtgttaaagacactctgcgagacagacgactacggcgagatccttcgtgcaaaaggtatggtagccgatgtgaatggttcctggatctactttgacatggttccgggtgagtacgagatccgtgagggagagccagattataccggaagactctgtgtgattggtacacatattgacgaacacagattagaggaactgtttggaatcgcgtaaaagcgggaaaaagttactcaggaatggagatttatatgaacgaaataccagtatatttatttaccggttttatggacagcggcaagacgactctggtgaaggagacgttatttgatgatggtttcactgagggtggaagaagtgttgtgatctgctgtgaggacggagatgtcgaatatgacgaggaggagttaaaaaaaatcaacgccagacttgtcatggtagaaaatgaagaggattttaccgaagagtttttaaacaaagtgcaggcggaatatctgccggagcaggtgtttatcgaatacaatggtacctggggaatgggaacactgatggatatggaactcccgaaacactgggtgatcgtacagcagttagcgactgtggatgcgacaacgtttgacatgtatcttgcaaatatgcgtaccatggtaatggagcagttatttcaggcagatgtcgtgatctttaaccgctgtgatgacagcacggacaaaggcaaatgccgccgtaatgtcaaggcacagaaccgcaaggcacagctcgtcttcgagcgtgaggacggcagcttggatgaatgtccggaggaacttccgtttgatctttctgcggatgtgatcgagatcaccgatgcagactatgcaatctggtacatggactgtatggataatccgaaaaaatatgagggcaaaaaagtatctttcctggcattggtatacaatccggaaaaacttaaaaaaggagtgtttgtgccgggacgttttgcgatgacatgctgcatcgaggatgtgacatttatcggatttaagtgtaaatatgcggatgaggacaagatcccgcacaaatcctggatcaatatcactgcggaagtgcatgtggaatttgcgagagagtataagggaaaaggaccggtactttatccggtatccatcgaaccggcagaaaaaccggaagatgagctggtatatttctcgtaaaccggatatgttctgcatgtgtaagctgggaagaataatcgctgctggtcacacttggagatgtgaacagtaacaaatagatgcataggaaaaggacagaagttggaatccgaagaatccagtttctgtccttttaaaatttttagtaatcagatattattttttgtgttcttgtttttctttgagcctattcttccttgattccatgttcacgcatatactcaccaatctttttatcggaacctaagatatgattgatcagccagccggacaaaaaattgatcaggtcaatcagatattcctgctgattgtcatccatttcgtccaaatctgttaaatcaacctcaacaagacgttccacgaaggcagtatgtgcacgtttctgagcactgatttccggataatggatgcgttccatgagattttcttcatcacggaaatgaaattctgtatagtcttttaattctacaagcaggtgcatgatctcatcatatttgtcatgcagaagttctgcgtgaatcagatcgttggtatcgtgaatgatctcaaacagccgtcggtgctcagtatcaattaactcaacgccggttttgtatttttcgcaaaatgcaaatggatcttcttcatcagcagaaatagaagacatttttccgatcatcgtatcactgcttaagatatgccggtataaccagcgagccagataagccagcaggtcgtttagggattgccttgctgcttccggggaagaagtatccagagcaaaagtgttgattttttttgtaaatgcttcatgttcttttttttggatcggaagctcaggatcatgaatatgctccatgtaagcttcctcatgggcgaaatgtgttgcagcgtaatttttcaatccggaaaccagattcttggagataacagaggtatctgaactttcttttgaaaggtcaatcgcttcatttatcatctgaaataaccgacgatgctcattatcaatctcgtcaattccaattaaatagtcgtctgtaaatttatacattataaaatcctccattccgtggtaaataccacttttcttttgaataaaaatatggatttcccagcccataattatatttatggagttatatgggataatacatcaacattataacatgaatccgtgtgagaaaaaagtaaataaaaaagaaaataaaaaatgtgttgacaaaatcactttaatatattaaagtatacccataaagaaaaaccgttgagaaagagtagtaagcattttttgatattacagagagctgcaggtggtgggattgcagtatggatggatttgctgaatggacttttgagggcggcctgaacaggatttagtaggcgccgccgggaaccggacccgttacccatccggcatgtatggttgtacatgaagtgagtggacttttcagtcaatatgagtggtaccgcgataatagatactattaccgtctcaggcaagaacctgagacggttttttaatgtaaaattcatttacattgtaaacgaaagtttgcatgatgacgaattccacctctcgaaacggctttttccaaatttaaaatctggagggaacaagtgcgaaaaatagaatttttcgcacacaggatttgtgcttatgcacaaacctgtaatgcgcagagaacggcgcagaaaggggaaagaaatgaaaagaaaaatgatggcagcagtattaataatggcaatgacagcaggtgtgcttggtggatgtggaaacagcacgggaaataatgcgaaaacagacacaaatgcacagaataatgcaaataccgcagaaataaaagagaatgccaatgcggatgtgacagagatcgccaatgcagatggcacggtatataaagttggtatcgtccagtatgtagatgatgcttccttaaaccagatcgagaaggcgatcgaggcagagcttgatgcaaaaggtgcagaacttggtgtgacattcgattatgcagattatacctataatggtcaggcagattcctctaccttaaatcagatcgcaacggatctggttgcagaaaaagtggatgtgatcatcccgatcgcaacaccggcagccatgatcatgcagaatgcgacagaggacaatcagatcccggttgtattctccgcagtatcagatccggtcagcgcaggacttgtcgcagatttaaatgcacctggtgcaaatatcacaggcacatccgatgcacttgacaccacggctgttatgaaactgatcacggcagccaacccggatgtaaagaaaatcggactgttatatgataagagccaggattcctcaaaagtgccggttgcagatgcaatcgcttactgtgaggaaaacggtattgaatatattgaaaagacaggaaccaccaatgcagaggtatctgcagcagcagatgcgcttgtggcagaaggggtagatgcagtattcacaccgaccgataacacaatcatgacagccgagcttgcaatctttgaaaagtttgcagatgcaaagatcccgcactatacaggagctgattctttcgcgttaaacggagcattcttaggatatggcgtcaattatacagagcttggaactgcaacggcagatatggcagcagacatccttgtaaatggtgctgatcctgcagcaacagcagtccgcacattagacagtggtatcgtgactgtcaacacggagacagctgcagctgttggcattgatgacagtgtatttaaagatatgtgtgaggaattaaaagaagttacaaccgcagaagaatttgaataaaagcggaatagaagaaaaacggaaccggaggggattatgggttcgatcattacactttccattgtacagagcgcattagaacttggatttatctatgcactggttgcgcttgcattatttgtatcattttccatattagatatcgcggatctgtcaacagacggctgctttacattaggctgtgcagtctgtgcgacggtgacgcttgccggacatccggtgttaggactgtttgcggcggcggcagcaggagttgtatcgggattcgttactgcatttttacagaccagaatgggtattcagtccatcttagctggaatcatcgtaaatacaggattatacacgatcaacattgcggtgatgggttttgcatccaatatcaatcttttttcctgtgacacggttttttcatgggcgaaagatcatatcgggggaacctggtataaactgatcgttgcagctgtatttgttgtgattgtcggtgtgatactggcatggtttttaaatacgagactgggactttccatccgtgcgaccggcgataacccggatatggtaagggcatcaagtatcaataccggacttatgatcacgatcggactttgtgttgcgaatgccatgaccggactttccggcggactgctcgcacagtatcagaaatcctgtgatatcaatcttggaacgggaatggtaacgatcgcacttgcgagtctgatcatcggggagtcgatcatcggaaaaggcggtgtgttaaagcgtgtgatcggcgtggtattaggaagctgcctgtatcgctttatcgtagcgattgctttaagattaaatgttccggcagaatgtttaaaactggtatcatcacttatcgttgcatttgcgatcgcactgccttatctgaaaaagcaggcagcgtttatgaaacagcgccgccttgcaaaggcagaaaaccagttatatatggaacagatccagaaacagaaccagaagaaggaggaaccgtgatgttaattatgaaaaatgtcagcaagaccttcaatccgggaactgtcaatgaaaaatgcgcattaaaaaatctgaatctggaattgaaggatggcgactttgcaacaattatcggaagcaatggagcaggtaaatctacattatttaatgcaatcaccggagcattttttatcgaccggggacttattgtgttagatggggaggatatcacttaccagaaagaacatgtgcggagcaaggtgattggtcatttgtttcaggatcctttaaagggaaccgcgccgcatatgacgatcgaggaaaatatggcacttgcctatcttcgcgccaaaacctcaaaaaatgcatatttcagccgtatcaatgcggcggataaggcaaaattcagggagcaccttgcactgcttgatatggggttagaggatcgcatgaagcagccggtaggactcctttccggaggacagcgccaggcactgacgcttcttatggcgacgatggtcacaccaaagatcttgctgttagatgagcatacggcggcattggatccggcaaccgcaaaaaaagtgctcgacctgaccaaacagatcgttgcagagagaaagatcacctgccttatggtaacccacaatatgcaccaggcattagaacttggaaaccgtaccctgatgatggattccggaaatatcatcttagatgtgagcggagaaaaacgtgcgggcatgacggtggaggatctgttagagcagtttgccgtctgtgccggaaagcgtttggacaatgacaggatcctgttttcgcaggcggaatgatggttagtcaacgacaggatcctgttttcacaggcagaataagggaaaaataggattttttgcaggatctggcagtaataatttgagaaaaaacagaactaattgagaaaaaatagaggaaagccgttgaaatttaacgtgttttcctttattatgttaaagtatgaaaataaatactttgacgggcatgttgatgtatataaaaatgttaggaggagaccatgtatccaatcgtaagaagagaaaaactggcagataagatttatcttatggatgtcaaagcacctcgtgtggcacagtactgtgagccggggcagtttgtaattgtaaagattgatgaggagggcgagcgtattccgcttaccatttgtgattatgacagggaagcaggtacgatcacgatcgtattccagactgtcggagcatctacagagcgtatggcatatttacaggaaggagatgcattccaggattttgtaggcccgcttggatgtgcgtctgacctgattgacgaagatattgaagaattaaagaaaaagaagatccttttcgttgccggaggtgttggtacagcaccggtatatccgcaggtaaaatggctgcatgagcacggtgtggactgtgatgtgatcatgggatctaagacaaaagatctgttgatcttagtagaccagatgaaagaagttgcgacaaatctctatgtgacgaccgatgatggttcttatggattccacggtatgggaactaatcagttacaggaactctgggatgcaggaaaacgctatgatcactgtgtagcgatcggaccgatgatcatgatgaaattcgtatgtaagctgacaaaagagcttggaatcccgaccgttgtttccatgaacccgatcatggtagacggaaccggaatgtgcggtgcatgtcgtctgatagtaggcggggaagtaaaatttgcctgcgtggacggaccggagtttgacgggcatcaggttgattttgaccaggcgatgaaacgtcaggcacagtacaagacagaagagggaagagcgatgttaaagctgcaggaaggtgatacacatcacggcggctgtggcaactgtcagtagggttgagcgtttgaaaaggagatagagagaatggacgtattaaatagagtaccggttcgcgagcaggaaccacaggttcgtgcggctaactttgaagaggtatgtttaggatataacgaggaagaggcaaaagctgaggcagcacgctgcttaaactgtaaaaatgcgcagtgtatgaagggctgtccggtatctatcaatatcccggcatttatcgcacaggtaaaggaaggaaactttgaggaggcatatcacattatcagtcagtcttccgcacttccggcagtctgcggacgtgtctgcccgcaggagagccagtgtgaaggaaaatgtatccgcggaatcaagggtgaaccggttgcaatcggtaaattagagcgttttgttgccgactgggcaagagaaaatggtattaaaccgaaaaaagcagagaaattaaacggacataaggttgcagtcatcggttccggccctgcaggtttaacctgtgccggagatctggcaaaacttggctatgatgtgacaatctttgaggcacttcatgaggcaggcggtgtactgatttacggtatcccggagttccgtcttccgaaacagaaggttgttgctgctgaggtggaaaatgtaaaagcactcggtgttaagatcgagacaaacgttgttatcggaaaatctgttacaatcgatgaattaatggaaaacgagggatttgaggccgtatttatcggttccggtgccggacttccaagatttatgggtattcctggcgagcaggcaatgggtgtattttctgcaaatgagttcctgaccagaaacaacctgatgaaggcatttaaagatgagtatgatacaccgatcaaagcaggcaagaaagttatcgttgtcggcggcggtaacgttgctatggatgctgcgagaactgcaaagagacttggtgcggaggtacatatcgtataccgccgtggcgaggaagagcttccggcgcgtgtggaggaagtacatcatgcaaaagaagagggcgtgatctttgatctgctccagaacccgacagaaattcttgtagatgagaatggctgggtaaaaggcgcgaaagtcattaagatggaactcgctgaaccggatgcatccggaagaagaagcccggtagagattccgggatctgagtatgagatcgaggcagataccgtgatcatgtcacttggaacttccccgaacccgctgatctcttccactacaaagggacttgagatcaaccgcagaaaatgtatcatcgcagaggaagaaaacggtgctacctcaaaagccggtgtatttgccggtggtgatgccgtaaccggagctgcaactgtaattcttgccatgggtgcaggaaaagctgccgcaaagggaatcgatgaatatctgagcaataaataatagaccagtgatggtaaaaatgccggagtcagtggaaactgctgatgtccggcattttttcttaaaaactttttttataaaaatttcttaacacatctaaaatattccttaaatcttatccaaaacctactttttttcaaaaatattggttatacttgtaagcaaagttatgatgaattgtaaatgagtcagagtgacagtgatgaatactaagaggtatagctatatggaggaaaatgtgaaccagacagagaaaaaaatggcagaaaacgaaaaacagaatcagacgggaaaagaagtggcagaaaatgcagaccgggaacagacagaaacgatccggggactgaccgcacagcaggtggcagagcggaaagaaaagggtctctggaataaaaaagcggagtcggcgacaaagacgacgaaagagatcgtaaaatcaaacgtatttacatattttaacctgatatttttagtgatcgcgttattgttaatcggcgttggtgctttccgggatctgacatttcttccaatcattgttgcaaatacgctgatcggaatcgtgcaggagatccgctcgaaaaaggttctggatgatctgtctatcttaaacagtccgaaaacacgggtaatccgggagggcagtaaaaaagaaataccggcagaagaactggtgatggatgatatcgtggagctttctgcgggcggacagataccggcggatgcagttgtgttagaagggcagttaaatgtgaatgaatcactccttaccggagaagcggatgaaattgtaaagaaaaatggcgatgaactgctgtccggcagctttgtggtgtccggcagctgtctggcacagctgacaaaagttggggaagagtcttatatatcaaaacttacccaccgtgcaacacagacgaaagagggagaacagtcagagatgatccgctctttgaaccggctggtgcaggcagtcggtattgtgatcattcccattggtgtggttctttttatacagcagtttgtatatgcgggaacccctttgcgggacagtgtgacaagtatggtcgcagcgatcattggaatgataccggagggactttatctgttagcgagcgttgccatggcggtaagtgccatgcgtctggcaaagcagcaggttttgatccatgatatgaaatgtattgaaacgttagcccgcgtagatgtactttgtgtggacaagacaggaacaattacagtgccggagatggaagtggatcagtttattcttgcagaagacctgacgaaaagagtttatgagaaagacggtgatacgaaagtatatgtcgatgtaaagtgcggtgaggaacaggaacaaaaacatgcgcagataaagggcatgatcggtgagtttgcggcagacatggatgccgataatgcaacaatggaggcattaaagacatattttaagccggatactttaacaaagataaagaaagcagaaaaggtatttgcattttcatcaaagacaaagtacagtggaatcatttcagagggaaaaagttatgtgatcggtgcacctgaatttgtgcttcgggaggattatgcagagtacaaagaccgaatagaagcgtatagtgagaaagggtatcgtgtccttgtgtatggcagatatgagggaattttagacggacagcagcttacggaaaaagtattaccgatcgcgtttatcatgctgacaaatgcgatacgggaaggagcaaaggaaaccttttcctattttacagagcgtggtgtggagatcaaggttatctccggggataaccctaagactgttgctgaaattgcggaaaaagcgggaatctgtggcgcagataactatgtggatgcatccacgttgacaacagatgagagtatcgcacaggctgtagcaaaatatcagatttttggcagggtgacacctgatcagaagttaaagtttgtggaagcgctgaaagcacagggaagaacggttgccatgacgggtgacggtgtcaatgatgtgctggcattaaaagatgcggactgcagtatcgcaatggcatcgggaagcgaggctgcatcgcaggtggcacagcttgttcttttggacaatgatttttcaaggatgccctctgtagtgatggaagggcggagagtggtaaataatatccagcgctcggcaagcttatatctggttaaaaatattttttccatgctgcttgcagtattttccatgatctctatgatcaattatccactggaaccgtcacagatttcgctgatcagtatgtttacgattggaattccgtcttttgtgcttgcattagagccaaacaaagaccgcatacagggacattttatgacaaatgtgttgttgaaggcattgcctgccggacttaccgatttttttgctgtcagcagtctggtattgttttgtcaggtatttggtgtgaacgaagaggacatttcgacatcctgtacgatacttgttgctattgttggatttatgatcttatatcagatcgcaaaaccgatgacggccggacaccgggtactgatggttggaatggtcgccggctggctgttctgcatgatatttgtcagccacttatttgcaatcagggatatctcagggcagtgtatgatgctgactgcggtatttacggttgcagcggagtccattctgcggtatctgtcgaaatttgtggagtggatgcgggaaagtcttttagtgttaaaaaagaaaatacatcaggcaacagcatgaaagaggacaggtattcggtaaggataaaaaccggataaaaaacagccgctccgtttttaaagcagagcggctgtttagcaatcaatttttgtgaaaatgaaatgttgtagttattccagattaaggtgttttttgatgataaccatgcacacgatatagaaaacaacacattcgatgatcgaaaagagcgatccggaaaacagcatagaggaaacagttgtgctgaatgtaacgttttcagtggcattataagttacaacattgacgttgttcatgacaccaaaatatccggtaagtaccaggatgatcgaggatacaatctgacctgacatgtaaaagacgattccggcaccgatggaagctcctactttatgttttgtaaagagctgaccgatagaaccgcttgcaaataccatcaaaaggtactgtaggcaggataagatcatggcaaaaatcatataaatgctaaacgtatggagagacatgccaaacagattctggaaatctaccatgagcatatcaaaatctgcatcaaaggaaaatcctctgtttgccgcacagcccagggcgaagatcgatacaaacataatgatcagggagagcatcagccagcatagggaaacgagcagttttacattaaaaattgacatctggccaaccggcagtgtgtgtgtcaggtatccctgatcagaatacattgtcttataaaaatgtacacacatatatacatagcttaccacgaaaagtgcaaatacgccgagtacataaaataccatagctgctgtaaagaagatctcctgtaactggttttctgtgccggcaggatcactgtcaccgtacatggcaatacagccaaggatggtaacaaacgccataacgccatagatgatgaacattaacttgtatgtgtttttaaattcgtatttaaataattttcctaacatctgaatacctcccggaacagtgcatcgacggatttcccctcctcggcgcggatatcgtccacagaggatgagagacggatctgtccgttctgaataaaaataacctggtctaaaatgttttcgatatctgcaatcaggtgcgttgaaatcaggatggaagcggacggatcgtaattggttaagatcacgtctaaaatgtaatctctcgcagcgggatcgacacctgcgatcggctcatctaaaatatataattctgctttgcggctcatgacgaggataagctgcactttttctttcgttccctttgacatgctttttagagaatcatttggattgatatttagtttttgcagcatatcataggcgcgttcgctgtcgaaatcttcataaaagtcctgaaagaaggcgatgatctctttcacacgctggttcatattcagataactatgatccggcagataggaaatgtggcgtttgctctcgacaccgatcggattttctttgtaataaagggtgccggaggtcggggttaaaagtccgttgatcattttgatcagtgttgtctttccgctgccgtttggaccgagcagaccaatgatatgtccgctctcaatcgaaagatcaatgtggtcgatcgctgtttttccactgaaacttttggtgagatctttgcattcaagtaatgtgcccatcatttttctcctttcatggtctgaccgatcatagtcagaatctcattttcctgaaagccgagctgctgcataaatgagagcagttctgtaattttatcttttgcaagtgttgattttaattcatcgatcatggaagggtcctccgtaataaatcgtccggttgtccgctgtgagaaaacaagaccggttcgttcaagttctgtgaaagctttctgcatcgtgtttggatttaccgctgcctcggcggcaaggtcacggacagaaggcagtttgtctccgggtttatatttgcccgaaatgatatccatttcgatccgttcgacgatctgtataaaaataggacggtcggaattaaggttccatgccattgtatcacctcgtttctttgtactagtgaaataatacaataatacaagaaaagtgtcaagagatttttttgtaaagtattctgattttatgacgatataaattacataacaggagaaagctaaggatggcgtctgattttcaaggaatgaaatacccggaaaaacaggcgccattttgttatatggatgaaaaatcagctgtataacgggaagaacttaactgttgtcataaaatgagttgtgaaatggggaaaatgagtatgagagttggaaacagactaaacagcaccattgtgcgtgcgcggatgaaacgtattgcaaagacgaagacatttacgacaaaacggcagagaacacaaaagagcacttccgggagttccggacagtcgatcagtcagcttctttcaaaattaaatgcaaacagtggaaagacgtcatctgcggagcagttacttgcaaaccggacgcagacgcttttgtacagtggtatggagacggctgcggaacgtgtggaaaaacggttgggaaagtttttaaaaacggatggtacttccgtatttgacgaggaagatgagacaaagctgaaggaaaatgtgacagatcatatagagtcgtttgtgaatgactataattatctgatgaagcgtctcgcacagtccggcgatattgttgattcaaattatgccaaaaaactgaaaaattatgcaaatgcggaaaacaaggaactccgtgagatcggaattacgataaaaggtgacgggacattagaactggacgaaaacaaattaaaggcagccgatatcagccaggtaaagaaactgtttaccggtgaagatggatttgccaaaaaggtgtcgaatctgtcaggccagatcggcaaatatgcaaaagaaaaggtgacggaactcgagaaatcaagtgcgcaggcgagcagcaactataaccgctatgcacgctacgcaaataattcacagagttataacagcagttattataacaatggctattataacagtaaggcataatgacagatcagttttacggtgaagaatcgatcaaaataaagcagacggcaaagacaggctgggtacagtccgaattcagaaaacaggaaaaataccgtagaaattattatggtacaatttttcttgaaatcctgttagaaaaaatgcagcggaaagaggatgtcctctacattgagtcagtcagggcaccgcgggttgtgcgggtgaagcggagaaaaaaagagctgaatccccaaaatcgcaacgtggtggaaaagcaaaatgagcctgtcgcaaaagcctgtgatgagcacaggccaaaagaaccggctgcatccggggggcggtctgtgcagtccgtacagaatgtgcaggatatgccggtcatgccggaaataagactgtccaatgaaccggcggagcggctacagaaggggcgttcgggacttgggataaatgttgaaatgccgcctgaaagtcggaacgtgggcaatagtcagggtggaaaccaatattctatggagcattctatgagatcttccatggaagtcttcaaagaatattccatgaatgtttcaaaaaccgggatggcttcgatttctggagaaacgatccttgtgtgggcgtcgggagatattttagaactgtctgtgatgtcggagctgccggaaatatcgggaaattataatgcacgggcgtgcatggtgtaatgttgccggtcacacaacaggtgtgtacagcagtgtaaaaaagaggcggtgttcaagtcggacactgtctttctttaaaaatcggacttcttttttgtgcagtctgcacaagaaatttcaaatcagttgcatacgaagaatgacgtatgctaagataaatcaaagcatatttctaccatgtgaacagcgttattcagac

SEQ ID NO: 5141 - DNA, 23572 bp, Unknown
  gut microbiota DNA sequence
aagagtcgcaagcgactctttgttctgtgagcaggataagacgaatacataaggagtaccatcatggaaaccaaccataatgaaccaaaatatatcagggtaaaaggggcgagagtccacaacctgaaaaatgtaaatgtggatgtccccctgcatcagatcgtgggggtcgcaggtgtgtccggttcgggcaaatcttcgctggcacttggtgttttgtatgcagagggttccagacgatatctggagtcactttctacttatacaagaaggcgtatgacaggagcggcaaaagcacaggtggacgaggtgttatatgtcccggcagctttagcactccatcagcgtccgggaataccggggatccgcagtacgtttggaaccggaaccgaacttttgaacagcttaaggctgatgtattcgagactggcatcccaccgctgtccgaatggacattacatagagcctacgttaaaagtagcggcagagcaggaaatcttatgtccggtgtgcggggaaaaagtacatgcaccgagtgcggaagaacttgcatttaattcacagggggcgtgtcaaagatgcggcggtacgggaagtgtgcggacagtggattttgattcgctggtgccggacgattcgatcagcattgatgagggagcggtcgcaccgtggaacagtctgatgtggtcactgatgacagatgtctgccgtgagatgggcgtgcgcacggatgtcccattccgggaactgacagacgaggagaaagagatcgtctatcacggcccggctgagaaaaaacatattttttataaggcaaaaaaatccaaccaggcgggtgaactggattttacctattataatgccgtttacaccgtggaaaatgcgcttgcaaaagtaaaagatgagaagggcatgaagcgcgtggaaaaatttttaaaggaagatatctgtccggaatgtggcggcagcaggctttctgaagctgcgagagcaccaaggctccgtgggataagtctggatgaagcctgcaaaatgaccttaaaagaactggtggactgggtggcaggagtgccggattccctgccggaagaaatgcgtcccatggcagaatccatctgtgaatcgtttcaggccgttgcgaaaaggctgatggatctgggactttcttatctgtcgcttgaccggacggcctcaacattgtcgaccggagagaggcagcggatgcagcttgccagagcggtacgaaaccgcacgacaggcgttttgtatgtgttagatgagccttcgatcggtctgcacccgtcgaatatcaaagggcttaatgccgtgatgcatgatctggtcgcggacggcaattccgttcttctggtagaccacgatacacagatattatcggaggcggactggctgatcgagatgggacccgaagccggtgtgggaggcggatatgtgatcgcggagggcagcattccgcagattatttccaataaaaaatccatgatcggtccttttctggcgaaaacggcagatatgcatgtccgcacacaggcagggaaagaggaagtttttacacttggaaaattgcatctgtctacggataacattcacacggtaaagccattggaagtggatattccaaagggcagacttaccgtggtgaccggtgtttccggttcggggaagaccacgatggttttagagagtctgattccgggactggaagcctctttttgcggggaacatctgccgaaacatgtgaagagtatttcggcggaaggaattgcccatgtgaaactgatcgatgcctcaccgatcggtatcaatgtccgttcaacggtggcaacttatgcaaacatacatgatgaactccgcaaaatctatgcaaaaacagcggatgcgaaaaaccggaaatacaaagcgggggatttttcctacaatactggaaagctgcgctgcccggtctgcgacggaaccgggcagatcagtctggatgtacagtttttaccggatgtggacatcccatgcccggaatgtggcggttcccggtacgcgaaaggggcatggcagatcagctatgaaaataaacagggaaacaggtattccctgccggaactgatggagatggatgtcaatacggcgctgcaggcagtcaaggatctgaaactggtgcaccagaggcttggtgtcctgaaaaatttaggacttggatatctgacgctgggggaggaaacaccgagtctttccggcggcgaggcacagagactgaaacttgccagtgaaatgggaaaaggacagtcggattctgtctttgtgtttgatgagccgaccatcggactgcatccgttggatgtacagacgttacttggcgtatttcaggcgctggtcgataacggggcgactgtgctcgtcattgaacatgatctggatgtgatccgaaatgcagattatatcattgatatgggccccggcggcggagaggagggcggcagagtggtcgcctgcgggacaccggagcagattgcagcgaacgaggagagtgttacggggaaatatctataaagaataggggttgcgtttctcattcatttctgctacaatgaccacgtcattttcagacatatcaaaattcaaattttaatggaggtgaattttcatggacagttgcgatagcgtaggacgaagtaaaatatgcgatgtacgaagatgtaaaaaaagaatgtggctgtctgtgaaagtctgaccgccatattctatattgttgtgcacctttttatacatcgcatcagaggatccttgcaatcacaatgaagcgatgtatttttatgcccatttcaggcgaaaaggaggttacaatgagaaaagtattaatcccgaaaaaagactatgtaaaagaactgataaagatcatccgtgttacaaaagatgagcagaaattacggaatctgctgtcagattatcatgagaaagatatcgcggaggcaatcacatttctgacggagactgagcggaagcatctctaccgtgtgctcggctctgaaaggatcgcagagatattttcctattttgatgatgcggaaatgtacttggaggaactgtctttagagcaggcagcaaaagtaatttcctacatggatgcagatgatgcacttgacgtgttagatgatctgtccgagtcaaagaaaaatgagatcgtgagccatctggatgcggacgcacagaaagatgtgcagaaactgctctcctatgaggaggatgagattggaagctgcatgacgaacaactttgtctgtatttcagaggagctgtccgtccgggaagcgatgagcgaactggtccgccaggcgggggaacatgataatatttcaacgatttatgttaccgatacagaggaaaaatttgccggtgcgatcgatctgaaagacctgatcatcgcgagagaaaatacacctctgcaggagatcgtcagcagttcctatccgtatgtgtatgaacatgaaaatatcagtgaatgtgtggaaaagattgcagattatgaggaggattccatcccggtactgacacaggatggaaagatagccggtattctgactgcaacagatatcgtggagttagtagatgatgcgatgggagatgactatgcaaaacttgcaggtctgacctccgaggaggatttaaaggaaccgacgatcgtgagtatgaaaaagagactgccatggctgatcatattgttgttccttgggatggcagtgtcctctgttgtcggaatatttgaatctgtggttgcagttctgccgatcgtgatctgctttcagtcgctggtgcttgatatggcaggaaatgttggtacgcagtcgcttgcagtaacgatccgtgtacttgtggatgaggatttagataccagaaaaaaactggctcttcttggaaaagaaatgaagatcggctttttgaatggagcgagccttggcgtcatggcacttgtatttcttggcatttacatccacctgttcaaaaaatatgcctggatgtcagcattcctgatttccgggtgcgttgggatttctctggtcgttgcgatggtaatctctggttttgtaggtacgatcatcccgatgttcttccacaagatccatattgatccggcagttgcatccggtccgctgatcacgacggtgaatgatctggttgcagtaatcacttattatggattggcgatggtatttctgatcgatatttttcatatttaggaggaacggatatattatgaatacacaaaatttaagaaccctttttccaactgtaacgaaacaaaaaatactgaatctgtcatatggcgagggagaacattatacagtgcttcccatgattgcccaaaaagaggatacattttatctgtgggaaatttcagccatgtcggaacaggaatatgaacacagaaacagaacatacaaagaagcgaagacaaaccgggcagagttaaagcagaatctggaagaagcagaccaggtgtggatcgaaaaaattgtaagcggtggctgttgttttgaggccgcttcagcaacaggcacctgtcttggtgagcgatataatatagaggaacagatacagtttttatatatgcttggacagggagcggagttaggggagttagaacaggtggagcttgacaggctgtttatcacctgctatgaactgacgggaaaagatgggcagaaattatccgaagaagcattttggaatatgggaaatgaggatgttactgttacgctgtcggaacagcaccgttctgttctggtacaaaaaagattccgcttaaagaccggggaatatgcaaaacccaaagtgctccatctgaccggagaggcagaaagcagtgtttatgttcatggcatccggttccatgatgtctggaaagaggcggagacacgttttgaagataaacgatatctggaacatttcagcaaagaacagattgcacagatgaaacgggaatttatggaacttctgccgcagatatgtcccaaaggctgtgtcctgcccatgatcgaatacgagtgcgacagggattatcagatgcagttttatacgacggaatatctgaaacgcgcaccaaagcatcattctacggcattatttttcgcgatgcgtccggacacgcagattggaccgatgggatacaaaaacagggtatgtcagttagaagcaatggaggaaggctttgagggagagatatccgttgaattatttttgtgtcataaaacaataccgggagaagagaaaaaagcaaggcattaatgcaaattttgtgttatcatgagtgcaggtgaaagaaagcaagagggattgttttatgacacagactcatataaatattgcaatgttagcacatgttgatgcaggaaagacaacattgtcggaagcgttattatataaaagcggcagcatccggaaagccggacgtgtggacaataaagatgcatttttagataccaatgaaatggagagaaaccgtggaatcacaattttctccaaacaggctgttttttcgtatggaggatgtgaatttacactgttagatacaccgggacatgtggatttttccgcggagatggagcggacactccaggtacttgattatgcggtgctgatcataagcggtgcagatggtgtgcagggacatacgaggactctctggcgtcttctagcgcgctatgatattccgacatttatttttgtcaataagatggatcagcagggaacggatcacgaaaaattattagatcagatcaaggatacattgagcagtgcctgtgtggatttttcaaaaaatgaagacggaacttatcgtgatatggatttttatgaaaatgtggcggtctgcaatgaaaaagtgttagaagcgtacttagaaggcggcagtatagaagaggaatctgtccgtgaaatgatacagaaaagggaattatttccatgtttcttcggttctgcactgaaaatggaagggatcgaggagctgctgttggcactttccgaatatacgaaaatgccggagtatccgggagagtttggtgccaccgtatttaagatcacacgtgatgcgcagggcagccgtcttacacatttaaaagttacaggcggtgtgctgaaggcgagaaatctgctgtcaggacataagcagaataaagcagaggatatctgggaggaaaaggtaaaccagatccgtatctattccggtgaaaaatatgagacaaaagatgaggtggaagcgggaaccatctgtgccgtgaccggattatcctacacctatccgggtgagggattgggaagccaggaggagtccgaactgccgatcttagagccggtgctgacctatgaactgattttgcctgacggtgtgcagccacaggcgatgatgccgaaacttgcgatgttagaggaagaagaaccggaacttcatattgtctggaatgaagaactgcaggagatcaagatacagattatgggggaggtgcagatcgaaatcttaaaagcactgatctcagatcgctttggtgtggaggtggaatttggcaccggaaaaattctctaccgcgagacgattgcagataccgtggagggagtggggcattttgaaccgctgcgccattatgcggaggttcatcttttattagagccgggagagatcggaagcggacttacctttgcggcggatgtcagtgaggatatgttctcaagaaactggcagagactggtgcttacacatctggaagaaaaggagcatgtcggtgtgttgacaggatcgccggtcacagatatgaaagtcacattggtcgccggacgtgcacatataaaacatacggaaggcggcgatttcaggcaggcgacttaccgtgcgttccgacagggattaaagcaggcacagtccgtgctgttagagccgtggtatgatttccggctggagataccgaatgaatgtattggacgtgccatgaacgacattgagggaatgtccggtaaatttgatgctccggacagaaacggggagatggcagtgttgacaggaattgttccggttgcatcgatgcgtgactatgtaaaagatgtgacggcatacaccaagggacatggaagccttacctgtacacttcacggttatctgccctgccataatacggaggaggttgttgaggcgcttggttatgattcagagcgtgatctggcaaatccgaccgggtctgtattctgtgcccatggcgcaggatttgttgtcccatgggatcaggttatggactatatgcatttggaaagtgtgctaaagccggaaaaagaagcagaggaatggcagccaaagcaggtttacatgcagcagcagagcagagaagaagaatggatcggcacggatgagattgacagaatcttaaatcagacatacaatgctaataaacgggaaaaatctgctccggggcgcaatgtctggaaacggtcaggcggaagcagcacgaatatatcgccggtaacacggacttacacaccgccattgtcggacaaagaatatctgctcgtggacggttacaatgtgatatttgcatgggatgagttaaacgagcttgcccgtgacaatgtggatggagcgcgtggaaggcttctcgatattttatgtgattatcagggaatgcgtggatgtgaactgatcgtggtgtttgatgcataccgcgtacagggacacaagacggaaatgtatgattaccataatattcatgtggtttacacgcgggaggcagagactgcggatcagtacattgagaagtttgcacatgaaaatggcagaaagtaccgtgtaacggttgcaacatcggatggattagagcagatcattatccggggagccggatgcggactgatctcggcgagggagttagaaaaagagatcacacgcaaacgtggggaaatgttagaaacatatcaggcaaaacgtgaaccggaaaagaaggtgcatatggcagagcacattccggatgaggtggcagaagcagtcagaaaggcggattttcatgaataaacaggaagaagtaaaatttacacagtccggctttttaaaaattgatgggaaaaaaagagtttcggttcgatttgaacgtggaagtgatattgcagagggcatgcttccgccgggaaaaatcacaaagaatcatggattttccgataaggaagtagcaggattagaaatctatctggagatgaactgtgatgagatctacaaaaaagcgaaggaaattggtaaatttaccaacttactataaaagaatatttccattattattcgcatggatgatcctgcttacgacctgtgctggcagtcagtcggatgttttacgaatgaaatctacagaaaaggcatccggtcagacaatgctctcaggcgagcggctggcaaaaacgtatgatgcactgttagagacagccagaggacgcagcgaaacattagagagtgggagggcaaaagagtttgcatccgtaaactggcgcagaatggcaggcgttacaataaggattctgcttgtcatactcccagcgctgattttgcagttttggagcatctggtaccgcagggctgatgagatcgtgccgcgtggactgctcttagtgaagtttgtgaggagggcggacggaaaaaagaatggcattttagctctcatgaaataaagataaaaatattattttatgagaggtagaaaaaatgcagattcttatttgggttatgatgatcgttggtggtgccgcaggacttttgtccacggcttatcttgttttggctatgccgataattctggtgtggaagattttccgcaaggtgaaataccatatagcgatttgtgactgatgaagtggatttaaaataacggaccaaaatgccaaaatcctgtatttatgcaggattttggcatttgttttgtgaaactattgtgctggacaagaagaacttatgcgattcttttgtgaagaagcagattatagtatgaacaatcagaaaaatccgattgggattctttctaattggatggagatgaaactttgaaatttcgaatgtgcatatagacagtattttttgaaatatttaactggttggcaactttgatcacagcatctttaagattaaatatgccttgttgatacagacggaaaataatttctttatttttattggaagaagaaatgccgggatcattgtatacggattctttggtttctgtaagtgaaaaaagtatcaggtcatcaatattgtctgaaaaagtttcagaggaagcctgtgttacagaagaggagtcctgtgaaggaagcattccttgcagaaattcggagagtggcatttccatatgaaaatttatgcaaagtaaaccgataatccggccgtgttcgcctgtaataggaattgtacaagagcgaagcattgaatcagaactgcttttattgaaataaggagaaacagtacgtgaaggatcctgttcaagctcccctaacatttttaaagcgagatcggtaatgggagagccttctttccttccagtaaaatgtccgttgatgatttttatgacagagtgatcaagactttctaagctgtgaagtactaattcgtatccgtcaccaaggtatgcaccaagtccgtttaacatgagagcataagagttaagaatttgtcggtctgttacagtaagttttaaaaaaggattatccataataaatacctctttcttcatagttcatatcatttgtgtttactggttcatacaatcatgcatgaactaaaatatattttatcataaagtaaagtttgatactaccttaatcattataagtaaaaaagaaataatgtgcaagaaaaaatgaataaaagtttattgaatgaataaaattctattgactaaaatatattttattgctataatcaaattatcaaaaaataaaggagatggatgaaatgataaaacaaatttttacaaaaaatgctccggaggcaattggatgttattcacaggctgtacaatacgataaacttttgttcagttcaggacaaattcctgtaaatccggaaaatggggaaattgtttctggagatattgttcctcaggcagaacaggttatggaaaatattggggctattttaaaagaggccggaacggactatcgttcggttttaaaaacaacatgtttcttgaatgacatgaatgattttgctgcttttaatgaggtatatgcaaaatatttcacagacaaaccggcaagatcttgtgtagcagtaaaaacacttccgaaaaatgtattatgtgaagtagaagtaattgcggtggtgaaatagagaaaaacaaatgaagattagctggaaaaaatgtatccagccatgaggaggatttatctatgggtaatcaaaaagtgagagaaaagaaaaaaccaacattttttctggcagtacttcctattttagcgatgattttactgctcggagttggttatgcagttatgggactgagtccagaggtactgatgctggtttcggcggcagtggcggcagtcattgctatcgcgttgggatatacatgggatgatatcatggattctattgttggtaaactttcaaaaacaatgccggcaatatttattttaatcattgttggttttttgattggttcgtggatgattggtggaacaatcccgatgatggtatattatggacttaaaattataagtccccggtacatagcggttacatcatttcttgttacagcggttgtatcagtttgtacaggcacatcgtggggttcagccggaacgataggagtagctttgatgggagtagcagcaggtatgggggctccacttccgatggtagcaggtgcagtggtatcaggagcatatttcggagataaaatgtctccgttgtcagatacaacgaatcttgcaccgattgcagcaggttcgaaattgtatgatcatatagggcatatgttttatacgacaattccgggatgtatcatttgtattattgtatatacaatagccggtttttcagcagcaggtggaggtactgtggcaacaccggaaaaagtagaaacaatattgacaacattagagagcctgtttcggtttaatccgcttgtaatattaccgccactcattgttttatatggttcaattcgaaagaaaccgacgatcccagtcatgttgatatcaagcgttgttgcgttttttaatgcgactgtttttcaaggattttccttacagcagtgttttacggcagcaatcagtggattcagtcttgacatggtaacaaagacagggtttgatgcagcagcattgataccagatattccaagacttttagagcgtggtggtatgctttccatgttaaacacggttttgattgcattctgtgcgtatggatttgcaggaacgctggcagtaacgggatcattagatattgttttaaacaagttgatgaaaacagtaaaaacgactggaggattgattgttgcaacgattgtttcatgtattacggctgtttttgtgacgagtaacggtcagttatccattttaataccgggagaaatgtttgcaaaaacctatatcaaaaagggattacagcctaagaatttatcaagaactctggaagattctgcaacagttgtagaaccgattgttccgtggacagcagcaggtgtttatatggcaacaacacttggagtgcctacattatcctatcttccttgggctgttatttgttacacaggtgttatatttgcgattatatggggatttacaggctttggtattgcaaagataaaacctggggatgagtattatgatgagtatctggcacttcagaaggaaaatgaaacagtataaccaatatgacgaggagattgtatatggaaacacagtatgattttgatgatatagtgaatcgtagaaacacaaattgtggcagatgggataccatggataaaaaatatgggacaagagatatgattcatttgggtgttgctgatatggattttcgggcacctgttgaaatcagagatagtctgcataaaattttggatatgggtgttttgggatataccgatttaagtgataaattttttctcagtattcaaagatggtataaaaaacaatacaatatggatatccctagagaatggatcgttttttgtccaagaatcaatattgcatccagtatatgtgtggaaacatatacagaaaaaggtgacggtattattatgcatacacctgcatatggtccattgcagaattcaattttaaaaaataacagaaaaatgctgtccagtccgcttaaaaaaaatggggaacactatgaaatggattttgcgcaaatggagtcaatggtggatgaacatactaaaatgatgatcttgtgcaatccgcataatccaacaggacgggcatggacgaaagaagaattggtgcaagttgcagacttctgtagagaacacgatctgattttatttacggatgagattcatggtgatctgatgaaagcgggagtgagacatcagacagcgttggatgttacagaagagatgaatgacagactgattttagcaagttcgccgacaaagacatttaacattcctggagttattgtttcctatatgataattccaaacgaaaaattaagaaaagagatagaggttactattgatcgtattgggatgcataatccgacaatttttgcagtaactgcggtagaaaaggcatatacagaatgtgatgactggtatgaggctgtcaaaaaatatatagatgcgaatgaagtgtttacaagagattttttcgcaaaacattttccagaatttcatgtttatccgagagaaggaacatatctgctctggatagattatcagaaaaccggactaaccgagcagaaattagaagagtggtttttgaaaaaagcaaatgtgtcagtttatatgggaagtgtatttggggaagatggaagaggatgtataaggctgaatctggcatcaccaaggaaggtattggatgaagcatataaccggatgttgaaagtctggaaagaatggtaaatgagaataaaaggctggtgttctatagatgagaatgccagctttttgcgtgcatctgggaatgtactgattttacgattagattatgagaggggagaaaactggtgtaaatacggtggggatatggtacaataaacgggtattgaaagattaagaacaaatatacaaccagatctagtacaggtcaggtctatacagaaaaataaggcagatattatctcccggaaaggagactggcagatgaatgatgcattgaaaattgaaaataatgatattatgaacaaatttcaaaaaacggaaaatatcttaaatgatgttcaaaatatcatagaagtttcacagaaagaagcctatcgtgcagttaatacaatattgtcacagagaaactggctgatcgggtatcggatcgcagaggaagaactggcgggtgaagatcgtgcagagtatggggtagagattatcaaaaaattgtcaaaagaacttacagataaatatggaaaaggttatgacagaagtaatctttatcattgtgtacgattttataaagcttttccagagattgtcgacacactgtgtcgacaatctaatattagactttcatggtctcattatagaactttattacaggtgcatgataagacagcgcgtgattggtatgaaaaagaagcatatgagcaaacctggagtgtgcgtactttacagcggaatatagatacacaatattattacagattactgcagtcgaaagataaagatgctgtagagcatgagatgcaggaaaagacgtttgagtatcagcaggacaagttagaatttataaaaaatccagttgtggtagaattcttaggatggacattggacgcttcttttaatgagacaaaattagaatcgagcattatctcaaatttgcagaaatttcttatggaaatgggaaaaggctatgcgtttgttgcaagacaacagcatattcacactgagaaacaggattattttatagatttggtgttctataattatattttaaaatgttttgtattgattgatctgaaaacaaccagaattacccatcaggatgtagggcagatggatatgtacattcgcatgtatgatgaattaaaaaagtcaccggatgacaaccctacgttaggcattgttttgtgttcggaaacagatgaggatattacaaggtattctatattgcatggaaatgaacagctatttgccagcaaatataaattatatctgcctacggaagaagaactgcgtgaagaaatagaagcacaaaaggcggttttttatttacagcagaaagaaacggaaaagcaaaacaaggaggaaaatcctctgctcctgcaagaggcacatgctatgcaaaagtagcatagcagacattttgctccgcaaaacaaggaggaaaatcctctgctcctgcaagggcagtcgcattttgctccgcaaaacaaggaggattaaaatgcttccacaagcgtttttaaacagaatggaatcaatgctcggaaatgaatatccggcatttttagaaagttatgacaaggataaatatcaggcactgcggttaaacagtatcaagggagatactgcgcagatgcagggaaaagtacctttttccctgcaaccggtagcctgggcgaaagatggattttactatgaaaaagatgacactccgggcaggcatccgcttcatgaggcgggcgtgtattatatccaggagccgagtgccatggcgccggtttcctatctgatggaagattatgatgtggtgcaaaaagaagcggcagactgtcaggaacggatcttagatttgtgcgcggctcctggcggaaaaagcacacagatcgcggcaagaatgcatgaaatgtacacatccgggaagtggaaggagcagggacttctcatctgcaatgaaatccatccggcacgcgcgaagattttatcggagaacgtggagcggatggggattgcaaatgcaatggtcacgaacgagtcgccgcagcgtttagcggaggtgttcgaggattattttacccgtattctggtggatgcgccgtgttccggggaaggcatgttccgcaaaaatgaggcggcatgtgaagagtggaaccctgagaatgtccgcctttgtgccgaaaggcaggatggaattttagactgtgcggcttccatgcttgcaccgggcggcaggatcgtgtattcgacctgtacctttgcgcctgcggagaatgagggcagcatgacacgctttctactgcggcacccggagtttcatattgtggaagtgaaaaaggcagagggtatgtcggcaggagtaccggaatgggcttatttcggggaaaaaatgggacaggtattgcctgagattgcacagacgatccgtctctggccacagcatctgaaaggagagggccactatctggctgtccttgaaaaagagggaacactaagacagggttattgccggaatggggaagaaaaaggaatccctgcaaaagatctgaaagtaccgggcaaaggaatcgtggaatttctggattttgcgaaagatacattcgatccacagacattagccggactggagaaaaatggtacatatctgaaatttggagatcagctttaccttgcaccgaaaggtatgccttctgtaaaaggtcttaaagtcctgcgaccgggactgcatcttggaacggtaaaaaagaaccgcatggagccgtcacatgcgcttgcactggcactaaaaaaagaacaggtgcgctatacggcagatctggcttcggacggagaggtgattcgtggttatttaaatggcggaactttttcttatgagggagaaaagggatggtatctgatcatggcagacggatttagcagcggctggggaaaactggcgggtggaatcatgaaaaaccactatccgaaaggacttcgaaaaatgtggtagtgtgaaaatgagatttttgtcggggcagaatgccattgtgcagggtggaacgctgatcgtactgcttatggatcaaaaatcaatgaaatggcattatggcgagaagtattaaatgtaatcattgcaattacatcggctttctgatatgattactgccagtgagaggtgtttaagcagtttcaataaagaaaaaaataatgcagagatgtatattcatttacggatacacatctctgcattttgtttacgattatagctatgccagcgcaggatacaatctatgattctgaactttgacttgcaattctaaaaagaatccactatcagattttacccatcaggcacgttccttcgcacctgattttactgtgaaaaatccaaactgcgccgcaatctttttcgcataagtcagtgcaaagaacaggataaagctgtcaattggcagcatgatcacgtttttgatgacacgcgggccaagcagtgcgataaagccttttccgtagagcatggagatccagagcgtattcagaccgcagttgatgaccagttttacgagaaactcagcgatcacgatacgtttgatggagaccggacgacggtagagcagggtgccgtagatcagaccggaaagcatggcattaaaggtgaatccaaagaaaaacggaccatccggttttaagacatactttaaaagatcgagcgcaccgccgaacaggcatccgaccgccggaccgaataaaaattcaacgatgcggtttggcagcccggaaaagccgatcttgatgtaaggaccgagctggatgcttgcgaccatacttaagacgatggcgagtgcagctaagagtccgcagagcacgaccgtctttgtgtggcacagttcctgaagtgattgttgatacagttcctttaattttttcataaaaaaagcctccttccttagcagtttcctaaaaccacatagaggagacataaatacctttatgcagcagcgggatgcgaattctgtaccgcaaacaaaagcagcgcctttgtttttcgtccgtgtgacaactccctgttcacatggcacttaacgcacagagttctactctgctaatatgaaatattagttttgacaagttttgttatagcatactgataaggctttgtaaagaagaacttatattttgtgatgtatttttaaatatttctgataaaacagattcctgtaaaggctgatgacggatcaggatttcagtgttagaataaaaggtatcatgagcgtaagcaaacggcgaattggatcatgtgacgattttgcacatgatatgaatgaaagtaatgtgggaggaaacaccatgaagctgaccggtatccatatcaaaaattttaaagcgatccatgagatgaagattgacaacattgaaaatgcgctgattctggtaggacagaacaataccggaaagacaacgatcttagaggcaatccgtgcagcttttggggattaccgcatctcttccgaagattttgacggtgactgtgccaacattgagatggatgtgtcattagaattttccattgaagatttaaaatggctgcatcagaacggggtggtcagccagtataaaagatatgagacgtggcttgaggatttcggcaaaaagctgccgtcattttctctgaacgaggaagcgacaggcggcgtactgcagtttacgtttatcgcacacagggatggctgggtgcgttatcaggataaggaacataagaataattcctgcatcccgcaggtgttcccgaagatctattatctggatgcggagcgtgatctaaaccagctgcagggagatcttttaatgctgcaggaggatgagctgttaaaacggatgcgagcggacacctgtatgtttaatcaggcgaaaaaatgtgggcactgtttttcatgtatcggtctgatcgagaagaaaacaccggcagaattggatgcatttgagacggcgaaacttttggattacaaactataccagttaaatctggatgaatttgcaagaaaagtaaatcggaattataaaaagaacggcgggcaggatgagatcttatactcgatgaaccgggatgtggagcggatgttaaaagttacgactgagatccacaatccggcacagaatctgaccagaccggtggcaaagatgggaaaaggtatgcgcagtatctacatgctgtctctgcttgaaacttatacggggacggaagggcggattccgagcattcttatgatcgaggatccggagattttcctgcatccaaaactgcaaaaagtttccggggagattttataccgcctgtccagaaaaaaccaggtgattttttccacgcactcgccaaatctattggcgaactttaacagcaggcagatcagacagattgttttagacggcgaaggctattcgaagatgtgtgaaaagacagacgtgagtgcgatcctcgaagatctcggttacacggcaaatgatctgatgaatgtgaactttgtatttatcgtggaggggaaacaggacaagagccgcctgccgcttctgatccggaaatattattcggagacttatgatgagagcggaaaactctcaagaattgcgatcatcacgacaaacagttgtacgaatatcaaaacctacgcaaacttaaaatatatgaaccaaatctatctgcgggatcagtttctaatgatacgtgatggggatggaaaagatcgtatggagttagggcggcagctctgtcgttactatgagcagcggaatttggaggatgttgacactctgccaaaggtcagaccggaaaatgtcctgattttaaagtattattcatttgaaaactattttttcaaccccaaagtgatgaccgaacttggcgtggtcaaatctgaggaagcattttatgagacgctgtttgaaaaatggaaggagtatttacatcgtcttagcagcggaaagcatctgacggaggtgctcggatttgagatgcagagcatttctgatatcaaagctcatatggaggagataaaaatatatctgcgcggacataatctgtatgatattttctatgggagatacaaagatcaagaagaagaactcttaaaacgatacattgatcttgcaccgcgggaagatttttccgatattttagatgcgatcaatcattttatttattttgagagcagaaaacgagaaagggatacaaagtgaaatgaaacgaaatggtgcaaatctgacagaaggaaagccggtcaaactgatcctgcagtttgcaatcccggtatttttgggaaatctgttccagcttttttatgggctgattgacacaaagattgtaggcagtacccttggtgagggagcgcttgcggcagtcggttccgtctcgatcctttataatctgctgacgggattttttaacggtttaacgcttggtttttcggtcgtgacggcaagatattttggggcaggggacacggaaaaattaaaaaagagtgttgcgggaacgattcttttaggatttgtgacggcggcgatactggtgaccggcgtatttgtatttttacgtccactccttagcatcatgcatgtgccggcagaacagaaagagatggcatatacctatatcagcatcctggtgcttgggatgtttgtgacacttgcctataatatgtgtgcaaatgtattgcgtgcgatcggagattccatgacaccgcttatttttctgatccttgcggcggtgttaaatgtcattctggactatgtctgtattctggtattttccatgggtgttggcggagccgcagcggcaactgtgatctcacaggtggtatccgtggcgctctgtgtgatccatatcaaaagacatttcccgatccttcaggtggaacgcagacattttaaactggaaaaatcagaagtgcgtacgatgttgtccggcgggctttccatgggaatgatgtcgagtcttgtaaatcttggtactctgatcttacagactggaatcaatacacttggaacttccgtgatcgtggcacatactgcagcacgaaaggtttttgaaatatggggactgccggtcacggtgctgggagcgaccatggcaacctacagcggacagaattatggcgctggtaaatatgacaggattacttccggcttaaaggcggcgctgatgcttggctgtggctgggcggtgatggtcatgatcatggcatatacgatttctacctgtctggttggctttatagcgagtacgcaaaatgcagaaattctatactggggaacaacgtatctgcgggttgatatgttgtttgagatggtctgtgtgtggatcgtgatcctgcgcaacacgatgcagggagtcggagattataagacaccgatcttttccagctttctggaactggcatgtaagatcgtgttcacggcgttattcgtccggtatttcggttactggggcgtcatctggacagagccggttacatggatcattatggtgataccgttaattgtcatgctgaaaaaaaatcctgtatttcaccaaaagaagacagcttagaaaacatcagtagaatcgaaaaaaacagcaattcgcatgggaatatatctcagcagcaagttgctcagaaacgaggaatattatgaaaaaacaagtgaactatatagagattgcgaaagaaaccgtgatactgacggcagcggtggcagtcattgcggctgcagtgtatttctttttggtgccaagccatgcgtcagtcagcagtatttccggtcttggaatcgtgctttctaattttattccactgccgttatcggcaatcaccatgattttaaatgtggtgcttctggtcatcggattttttacctgtggaagggaatttggggtaaagaccgtttataccagcattatgctccccgtgtttttagggatatttgaaatggttttcccggatattggatcactgacggacagccaggagttagatgtgctgtgttatattttagtggtcagtgtgggactcagtattttatttaaccgcaatgcatcctccggcggacttgatatcgttgcgaagatcatgaataaatatctgcatatggatcttgggcgtgcaatgtccttatcggggatgtgtgttgcactttcagcagctttcgtttatgataaaaaaacagtggtactcagtattttgggaacctattttaatgggatcgttttagatcattttatttttgatcataatatcaaacgccgtgtgtgtatcattacggaaaaagaggaggaactccgcaattttatcctcaatgatcttcatagcggggcgacgatctatgaatccatcggtgcttataatatgcagaaacgcaatgaaatcattactatcgtggacaagaacgagtatcagaaactgatgaattatatgaattatgaagatccgaaagcatttattacagtgtatcatgtgtcggatatcaggtatcagccgaaagggtaaggtgcagtcagtggaaaaatggagtatgaccatacgcaggttattcagtaaagatccaaacgatgaagaggagaacgtgacgcaaaatatttatgtattccggtttatactgttttgcattatcgtttactcatttgagatgctgttaaacagtgttgatatttttatcgttgacaagacgatttttacaagagggtatgttacaggatgtctgtttgcagctgtatatgttttgattttactgcatcttggactggagcatccgctgacgaagtatgtcagtattacggcggtcagccttatcatcatggctgcgagtgtgtccttaacctatcatatgatcattattattatgatgccgatcatcatagccggtatgtacacgtcaaagcaactgtccatatatacgtttgtacttacagtgctttccattattatcagtacctatgcaggatattattatggtgtgtgcgatgccaatatggtgcttctgacaactacttctatgaatcatctggttgaaaatggaatttttttactgaatcaggtaaatgaaaatccgggagtcacgcttgcactgtattatgtgctgccgcgctgtctgatggcaatgtcgtttgtctatgtatccaacattgtaaatcaggtaatccgaaaatcactgaaaaatgcgatgaagatggaagagaaggcagcgacggatgagatgacagggctatacaataaaaacaagctgcttgcgaccattgagaaaagaacatatgattaccagcaggttgccatcgtttaatgggacattaaccgtttgaaatatgtaaacgatacatacggacattttgccggagatcagatgatcgtaaaagtggcacagtcaatacggattgctttaggagatgcagggatggcattccggtatggtggagatgaaatgcttgcgctcattccgggaggaaccggcgaaactgcggaaaagatgataaaaacctggaaacagacacttgcagcggtacaggtggactgtgagataccgatctcagcggcggttggatatgccatcggcgagcatgaaaagttaaaaaatgtgattgcagaggcggacagaaatatgtatgcatgcaaacatgcaggcagaaattcaactgaaaaataaaaatttaaaaaattcttgacttgaagtccacttcatggactatactcttcgaaaaaaggaggtaatgttcatgatgacagaaaaaatgataacattaaataatggtgtggaaatcccacagcttgcacttggaacatggattgttgatgataataaggttgcggaaccggtgaagacagcgatccgtttaggataccgtcatgtcgacacggcacaggcatatgcaaatgaagtgatatgttgtattaagaaggtgatactcttttaatcgaaactgtaaacatttagcacaaaggaaggagcagcgtatggagttaacatatcattgggaaggcgatgtattgattccagatttggaattggaagatggaaacaattatcagattggcaaatatggcagaatgtgacagaggtatttgtttgaaaatcatcatgccatgtatacacatctggttcttacggaaaaattgtggaaacatttggaagaagtagatatggaatgcaatgacatgatggatatgcttacggtaagaatggctgagcgtgaaggtgtgacggagcacttgaagtcagttgaccagctcggatgggtacggaaaatgaatagtatccggagcagagctgaggaagtagtgttgcatgatctgatttatatggattaaaaatagcgggaaatcttaattggtttcccgctgtttggcatatgaaaaagttcatagaaaattcagttgattccgtaaagttcctcgcttataatgatattgaggcagagagccttttgcggaatcttagaagtgttatgcacaatacaaaaggagggatgccgacttgaatacagaaatagcaaatgctgtgaatgtagc

SEQ ID NO: 5142 - DNA, 75314 bp, Unknown
  gut microbiota DNA sequence
caggaaggtgtgataaacgaggtgcttttccggacacagacggttttagaagaatatccgggttcgactgatgaaaatgaatacatcaaatgtatggacgcggtagagtgttatgaaaaaatggtgcagaccagccggctgatttataatgattcggtgacaaaattaaacagagagcttcacatttttccaaccagtgtacttgcacatatgctcggatttgaaaaacgggattatctggtagaaaattagcagaaaaggagatgcaaaggatgaataagttacacagaagcaggtacataaatgtagttgtatcaatgatgatggcatttttgatgcttgctgcaatgggaacgacacaggtacatgcagcacaatatacaacgggaacgattgatcctgccgaattgaaagctggagatgtggtttacaggggggttcagttaacggtagacagacagattgtggtttgtaaaaagtgcaatatgatatggattacgacgggcacggattacggtactggagacatgaaacgctctgaggtggtggctacggaagcccataaggatcatccggataaggtggggtatagcgagtttaactggtattttaatcttgacagctccggcccattgttaaaaaatacgccatatacgatcgtagaaaatgctaacattaaatacacgattacctataatacaaacggtggcagtcagatagcagagggaaatcagacgaacctgccagatccgctgccagctgcgacgaaagatggatatgattttgtcggctggtatacagatgcagattttacgacaattgcgcggccgggacaggcacttactgccgacacgactctttatgcaaaatgggtagaacacaggcacacattcaaggatgagtggagcagcaatgatacttctcattggcatgatgccatgtgtgaacacaccacagaaaaaaaggatgaagcagctcatgtttatggaacagcaggtgtggaaagatatacctgtagtgtctgcaaatatgtaagtgaaacaagaaaaagagaagctgaggcagcagataaaaagaatacggaaagtgaaccggtaaaagtaaaaaggacagaggcaaaagacgcagcattaaattcgaaatttaatgtgaaagcaggaaagacggtcaaggtaacttggggaaaagttaaagatgcagatggttatgatgtttatatggcatactgcggaaaagataaggaaaaggttgtaaagtccgtaaaggcagcggatagtttatctgttgagatcagcaaattgaaaaagaaaggaatcaatcagaaaaaaaatataaaatgtcatgttcttgcatataagatggttgatggcaaaaaagtaacagttgcgaaatcgatcacgatacatgcagcaggaaagaagaataaatcagtaacagatgcaaaaagcattaaactgaaaaagacttcttatgtattggcaaaagggaaaaaagctgtcgtaaaagcttcgattgtcaagaaggataagaaacgtccgatcattaatcatatatcgaaattccgatatgctacatcagacagtaaagtggcagtggtatctaaaaatggtaagatcaccgcgaaaggaaaaggatcctgttctatatatgtatatgcatcaaacggatgtgcacaaaaaataaaagttgtggtcaaataagagagacaggtataaagtgaaaatgaatgtgtaggagaaaagctgccaatgatagtgataatatcattaggcagctttttataatgaacaaaggaaaaagaaaacgtgtattttgactggattatatagtataatatattccgtgtctgagagagaaataaaacataagaggatagtgcgtgtgaaaaataagatttttcacacgcaagaatggggattaagatgagaataggatttgataatgacaaatatttaaaaattcagtcggagcatatcaaagaacgcatcagccagttcggtgataagctgtatctggaatttggcggaaaattatttgatgactaccatgcgtctagggtattgccgggatttgcaccggacagtaagctccagatgctgatgcagctttcggatgttgcagaaatcgtaattgtgatcagtgcggcggatattgagaaaaacaaggtgcgtggagaccttggcattacttatgatgtggatgttgtccgtctgatcggagagtttgagaaaaaaggactctatgtcggaagtgtggtcatcacacagtttgccggacaaaatggtgcagtgcagtttcgggaaaaactcgaaaaacgtggaatcaaagtatatcagcattataagatcgaggggtatccgtcgaatattccactgatcgtcagcgagaatggttttggaaaaaatgattatattgagacgacaagaccgcttgtggttattactgcgccggggcctggaagcggaaaaatggcaacctgtctttcacagctttatcatgaaaacattcgcggaaccaaagccggctatgcgaagttcgagacattcccaatctggaatcttccgttgaagcacccggtcaaccttgcatatgaggctgcaacagcagacttaaatgatgtgaatatgattgacccgttccatctggaagcatatggaaagaccacggtaaactacaaccgtgatatagaaatatttcctgttttaaatgcaatttttgagggaatatacggtgaaaatacctattacaaatcgccgactgatatgggagtaaatatggcaggaaactgcatcatcgatgatgaagcctgctgcgtggcatctaaaatggaaattatcagacgttattacaccgcagtgaataagctggtaagagaagaagcgaccgaaaatgaagtttacaagatcgagcttctaatgaaacaggcgaagattacaacagacgacagaaaagttaccgttgcagcaaagaaacgtgcggaggaatcaggtgttccgaccgcagcgatcgaactttcggatggaacgatcattacatcaaaaacgtctgatttccttggagcatcagcagcattgcttttaaatgctttaaaatatttagccggaattgcacatgatgaaaagctgatccgcccggaggcaattgagccaatccaggatttaaaagtacgtttcttaggaggaaagaatccaagacttcacacagacgaggttttgattgcgttatctctcgcggcggtttcaaatgaaaatgcaaaatgcgccattgagcagattcctgcactccgcggctgtcaggtgcatacttcggttatgctttccgaggtggatattaaaatcttcaaaaaactgggtgtggatctgacaagtgaacctgtacgcagtggattgaagctgtactaaatttatttgatgtatcatgagccatagaataaagtaaaagaggaaataacatgaatctgattaatatagaagatctgacaaaggtctatgccgaaagaaagctgtttgatggtgcatcattttcattgcaggatggggagaagataggtgttattggcatcaatggaaccggaaagacaacgcttctgcggatgatcatgggggaagaggagacggatgagggaactgttacgactgctaaccatgtggtcatgcgttatctgccgcagcatccggaattcgaaccggaaaaaagcagtctggaatgtgtgctggaaggaaatgtaacggatgaaaaccgctggtctgttgaaagtgacgccagagcaatgatgatgcggcttggcattaaagattttatgcagcctgcaggacagttatccggtggacaaagaaagcgtcttgcgctgatatccgtacttctttccccggcagatattctgctgctggatgagcctacaaaccatttagataatgatatggcagactggctggaggattatctgaaaaaatggagaggtgcgcttatcatggtaacacatgaccggtatttcttagacagtgtgtgcaaccggatcgtggagattgataaaggaaaaatttatagttatcagacgaattattccgggtatctggaattaaaaacccagcggcaggaaatggaagcagccagtgaacgaaaacgtcagtcgatcctgcgtgtggaactggaatggatacgcaggggtgcaagggcacgttccacaaaacagaaagcacatatccagcgctatgaagagctgagagaccgtcaggctccggtgcaggattcgcaggtagaattaagttctatttctacaagaatgggaaaaacgactgtggagttagaaaacatctgcaaggcctatggagaaagaaaactgatcgatgatttttcttatatctttttgaagggagacagggttggatttatcggaccaaacggttgtggaaagtctactttaatgaaaattattgcaggcattattccacaggactccggacaggtcattatcggacagactgtgaaaatgggatattatgcgcaggaaatagcctcagaaaaaaatgaggatgaaaatgaaattgatctgtcatatatggacccaaatcagagagtgattgattatgtaaaggatacagcagaatatattcagactgtggacggagtcatatctgcatctgttttattggagcgtttcttatttccgccggaaaaacagtacagtccgattggaaaactgtccggcggggaaaagaaaagattaaatctgcttcgggtactggcgacatccccgaactttattctgctggatgagcctacaaacaatcttgatatagctacgctgacgattttagaggactatctggaccgttatgagggcatcgttgttacggtatcgcatgaccgctatttccttgatagaacaatgaagcgtatctttgcctttgagggagacggaaaactgaaacaatatgaaggcggctatacagattatgtaaaccgacttgcggcagagggcaggacaccgggtggaaacattgcggcgcggtctgctggtgccgatatatcgggtaattcacaaaaccagaaatccgaagaaagtgtgatcgaaaaaaatgattcgactgcaacctggaagcaaaaaaagaaactgaaattcagctataaagagcagaaagaatacgagacgatcgaggatgatattgcagcactcgaactaaagttagaagatttagataacgagatggcagcgaatgccaccaatgcagcaaagctgcgggagctggttgaggagaaagaaaacgcagagaaaatgttagaagaaaagatggacaggtgggagtatttagaagagctggcggcaaagatcgcagggcagcagagctagtgtactgaatcattgatacagtacactggaaagcctgcctgtcagtccacgttcaggacaaatgtattcttgccgttctcttttgcctgatacattgccagatctgccttgcggattagctgtgtatagtcaagcgtatcgccctgggacatgacaatgccgatactgcacggcaccggcagcacctcgccggtctgttcgtttacatgctgcgtgcgcagaatctcaagaattttgtcggcattatgccggatgcgttccggttctaactcaccggcatagcaaaatgcaaactcgtcccctccgatcctgccgactgcaccgtgtatgttttctttaagtgtctgcgctacgaactggatgacagcatcgccctcctgatgaccgtaattggtattataatccctgaaatcatcgatatcgacaaagccgaatgtgatctgttcatggctttcaaccgccctttgcaccatcgaaagcatctctttttcaatcgcttttttatttttgataccggtcagagggtcgttctctgccatctgtaaaagtttctgctgacgctctttttctttccggtctgcctgttccacatagtctaacagctcgttgatacccgcagccagttcacctgtctcatgtttttcctgaatgtgaacgcgcagggaataatcctcactttccctgatttgcgcaaatacctgcagaatatgggtaatcggtgcgaaaattttctttgtcataaaatactgtgtacagcacacgccgatgatgagtgcagaaagaccgagcgtgatcagcatgccataggttcttccagtctgcttctgtgcactcagattttcagtcacacggatgccccagcaggtattttccacatcggaataatatgtaatataatcctgtctgtgatagcggtagcgcacataaccggacggatttttctcatggtcgatcgcatcccattttttctgaaaatcattgcggtcggaacttttagagacaaatgtctttaagcttctcttgttttttgtgtcacctgccgtgatgatcgccccattgccgtcgagaagatagaaagttccatctgcaagagtgtccatattcagccgcaggtcgtcaaaatatgccgtatccagctcctccatcacatagccgatcagttcattattataatagacgccggtataggcgggcacgacatttttcctgccgtcatcagtcatgcgctcatacacatcgccgatcataaattcaccggtctgatatttcgggtcgacatccttcattgcactgacggtgtttggcttgtactcttcacttgagctgacgacctgaaaattccggtctaccacagagatgctcgccacaaagatactgtattttttgcgttccttcaaaagattgtctacatagtttcgtgccagcgggctctctttttcaccgagactgtagagaatcgcatcctgcgtcagctgatagtttgcgatgatgtccatctcgttattgcggtcctgcgtaaagtttttgatattcatcacctgattttcgctgatcgcccgcacattctgctccgtcagctcatcaatcttgcggttcgtttcataaatggaaaatattccgaagataccaagcggtaccagggtaaaaagtaaaagtaaccctaaaatactatgttttaatttcatgctcgcagcttcctccatctgttatctattttatagctaaactgctgtttccgtcaactgttgccccagtgttgtacacaacccctgaaaaatatcgaaaggatttttttccccgcgtggataagatttcgatatgattgaaaacggtcataaaatcaatcgtaaaaaaatacgattgtttttatgattgattttgcatataatcaatacaatgaaattggaaagaaaacagttagtatgcaaaggcaggaaggacactcacaaatgaaagacaaaagcgaaacttcaacaacagatttgattatactttttttccttctgttcattatttcaaatattttatttgctgttgactgtatgctgctcagtgatgacgcagagtcgaatttgaagctgataaaagattttgcgatcagcacgggaagtctggtcggaataaacatagtcggattgatactgattgaatgttttgaaagaattgaaaaatatatttttcggcgaaaaaaccaaaaggaatgttttggggaaggtaattttcaggtattgcggtgtagcagcagatactacatgctcccgattgcagttactgcgctggatatgatgtttgtattatcttttttgcatgagagaaacaaagatgcacaggtgatgatagaattttttcaaggcagagatggaatttttccactgttttgtatgggattttttaacatctatggcgtttatgtgctggcgcattactgctgttataaagtgtattgtacaggatatttgttagaggtaatccattttttgaggaaaaaaagcataccgtggagtgatataaaaagcatagaatttttctatctggatcaatacaagaaacagaggattgtgataaatcttgagaagaaaaagattgtttttcgcgcagaggtgttaaacgatggctgggatccttttgtgaactgggtacaggatatggcaatgagatatcatattttgtttaacggtaaaatcctgactgtttgacttgcaaataagataaaaatccaaaactacacaccagatacaatgcattacggtatgctcaaaagaaaagggatatagagcgtaaaacggacagcacaccaggttgactttgcctgcgggggaaggtaaaatacagcttaagatagtataaactcggggagaaaactgcaatgctaaatataaccattgacaaggtcaggcacattgaagacaaggatgccaatgtacgcgaaacgcttgtcgaattacagcacgcacttgataaatctgaacaggaaagacatttttatgacgctctgtgcattgactacactgcggcatacttatgcgacctgatggcagataccatgactgtcatcaagaaaaaatcattctcccactgtgctgccgaagaactccagtctggcagcatacaatgctattctcaatggatacggcattcttataatacttttgtcgtgaaagagtcggccccgggctttatggaaatgtttgacaacaggaatctgatggcatatctggatgatcatgagagctttgtataccggcacagaacactgccgaaccgtgcaggaatggaatactttgaagcgcgggcagtgcgtctttattcagatgatgacagctacaagatcattcttggctaccgtccgatcgatgacattgtcgaagaggaaagggaaagccgtcaaaaattagagcaggcgttaaagagagccgaggaagcaagccatgcaaaatcagccttttggtttaatatgtctcatgacatccgcacgccgatgaacgccatcattggttatactgatcttttagaaatatatggggatgacgtggaaaaacgggaggactatcttggcaagatcaaaagttccagtgaatatctgctatcccttctcaatgatgttttagaaatggcgcgtattgaaagcggaaaatatatcatggacgaaacggtaacggatatcagggagtttgaccggtctatctgcgatgtatttgagaatcaattagagcagaaggggatccgttctgtttttctgtaagttcttttgcgatgctggcatcaggcatggctgctttgccgttttgtccggtgctgcagtgcgttaaaccatgcctgcggcagggaaaatccgaagatgataccgagtacgattgctccggcaactttgattgtctccattccgtaacgtgaaaattcactcatgttattcatgataaaataataggaagtataataaataccagcccccggcaccagtgggaaaatacctgcgatcaggtagatggtcacaggatttttccgcagggctgcaaccacccttgaaaagactgtgagggcgagcgttgcaatcatgtttgcaatgacggttccggtgtcaaactgcaggcagatcagatagacgatccatccgatcgcaccggtaagtccgcagaagagaagttctgattttggtgcacaaaacagcacggcaaaagaaagcgttgcgatcatactgacaataaactgaataaacatagtattacaaaatacctcctactataagattatagatcgtcatgacggttccgacacctgccgcaatacaaaaagcggtgagaaccgcatcgatcatgtggatcgcgccggagagataatcgccgttaaagaaatcgcggattgaagtcgttaatgcgatccccggcactaacggcatgattgcaccgatgatgatcttgtcatacaaaaccggcagtccaatggaaaaagtgatcagactgacgagtgtcacaagtgcgctgccgaaaatgttggtgataaattttgaagttttccgctgtgaaaacttttttaacatcatatttaaaattgcgccggcgataaatgcaatcacgccgtctaacggagttccgccaaacagaaatgaaaaactgccgcttccaagaccgcagaaaaagacttctgtccatttgctgcaggtggggattgctttgcattcatccagacgtgtccacgcatcttttagggaacattcgtgggaacagatttccctcgaaagctggtttaaggctgcgatacgcccaagatgtgtctgaccgagcgggacatgacggatcatgctgcacgcgtcatctttattttcatttgcactcgcaaaaattccatttgagagtacataaacatcatattcttcaatttcatatgcctttaagatatgcattacggtatcttctacacggtacacctccgcgccatttcgaagaagtgcatctccggtctctaccgctaaagataaaatttcttttgtgactgccatattgcagttcctttctatctgtgaaatcgatcattatagttgttcaactgttatattaaaatccaattcctgtcaggcaggagtttttcttaagaacactcatgaaaaaataacatgttttttgctaaaaagcaatctgtcgtgtgtaaaaaattatatactttccaataaaaagtaagatgccatatgcaataatttcctgtaaaagtaattttacatattctaatgcttctattttgtttatacataatatccccaaaaaaagagataataatttgcaaagtcagaaatcaatggaggcttagtgtgaaaaataagctcgatagcttatttttcgcacggctatttgtttctgagcaaaaacaaatagcttctatgacaaggcataaaaaaacatgcctacgagaatttgagattctcgttgcctcttcgcaacaagttgctcagaaatgaggtttactatgaattgtagaaaatacagagcagttttacttggagtgatagttatgatactggtggtcggggtttgtttctacacaaaatatcggaaagaaaatgagataccgacggatggaatgttggtatatgacaattcggaggatgaggatgtgaataagatatgggcgtaaataacgaaacactttatttgaaaatcgagcagaacacgatcgtttatgaccggcatgtcgtgctgaacgatattgcaaagatggagtgcacgaacgaagcggttctgcgtcagttaaaacagaaaaagatatacagttttacgaatcagaaagatgagaaaaaagagaaaaaccagatgcaggttttttctgtgttaaagatcattgagcagattcatgaagattatccgtcgctgacgatttccaatgaaggcgagagtgattttatcatagaatatattccgaacccggaaaagccaaaggtaatgaatacaatcaaaactgtgctgctatgcattatcattttttttggctccgcatttacgatcatggcatttaacaatgatatttccgtgacggatgtgtttgacaaattatacggacaggtgacggggacaaaggcggacggtgtgaatgagcttgaagtgtgctactgcatcggacttggacttggcatcattttatttttcaatcatgtcggaagaaagaagatcacgcccgatccaacgccgatccagatcgagatgcggaaatacgaaaaagatgtggataccacatttattgaaaatgcaggcagaggaggtcacagcatagatgtttcttaatcatattctgctcggatttttaggaattgcgtttggcggcgcggtcgctgcgggaacgtttgcttttgtgatcgtcatcggtgttgttccccgtatgatcggaaaatgtaaccgtgcggcgggtacgctctgctttgagcaggcaatcatccttggcggaatccttggaaatatcgtctccgtatttttgcagatgcatattccgcttggacaggtatcaggacatatctttctcggcctgtacgggctctcggcgggaatgtttgtcggctgtatcgcggtggctctcgcagagatattaaacacattcccaatcctgtttcgcagggcaaaactgaaagttggtctccagtgggtcatgtggacgatggcggtcggcaagacgtgcggggcgctttattattttgtgaaaaaaatcggggaagggttgtcgtaggagaggtttgacgtgtgaaaaatttcagattaaaatgatagaggtttggaacaattttttgttccggatttttcataatgaatacaaacagggggaatgagaaatggtcacatccatcgcacgtcagagtgttatcataaaatgcaacatgcagaaatctgtcctgaccggcaactacgaattttattatgcggcagggcttattgcaaaattatccggggttgagatttcagatgacatcaaaccgatcgaactgggggtacttttacatcaggaaatcgaaaagacagagccgaaggatgaacaggaaaagtacctgttttcgatgctaaaggactataagccgaccgatgagtatgatgaacagatgaaggagctgctcctgtggggaaaaggcgagcagtatctgtggacggtgacgattttgtgaatcaactgttcagggtaatttggattggagtcatagggagcatctgcccattctaagagttcttttgaaaagctgcgaataaatatagaaaagatctgacatactattccaataagaggaaaatatacgggaggaaaaaccatggcacaaccaaccaccaaacaaagcagttcagccaaaacatcagatgagcaaaagcagaaaaatttatccaaagtgtcatacggcgcagacaaaaaagtacgagaccaggcatacaatgaatatgtggagtccatcaccccaaaacacaaccttgcagcaaatatggcaaaggcatttgtgatgggagggattatctgctgcatcgggcagttcattttaaatatctgtaaaagccttggacttgataaagagatgtcgggtagctggtgcagtatcctgttgatcttattatctgtgatcttaacagggcttaatctgtatccgtcacttgcaaactggggaggtgccggtgcgctcgtgccgatcaccggatttgccaacggtgttgcggcaccggcgatcgagtttcagaaagagggacaggtctttggaatcggttgtaaaatatttacgatcgcgggaccggtcattttgtatggtattttttcgagctgggtattgggactgatctactgggcggcaaaaatgtttggattttgttgacaataagctgattgctatgctttactaaaagagtaaggtttcttttcgatatattagaagtcagtgaaaccacagaaatagtctcgcagagtgaagacactgtgacagagcaagcggtgacagaagaaaccgcagacagaacagaaagtacagaaagcacagatgcgacagagctagacgaaacaacggaaatatcagatacagcagaaactgaaatatcggaagaaacagaaactgaaaaagagtctggcacgacacagatcttagcaggaacatacgatgctgttatcggcggaacatattcaggtgtgtgtgaaaatcagggggattattacctgtactatgttacactgccggaagcaggaaaactaacgattgcgatgacggcacagatggagaagtgtgaggtatccgtatattctacggatgaggaagaactttattcacatacggaagattgtaatgaaaatacgaaaagagttgtggcatcctatgaagtgtatctgactgccggtacatactatatcaaggtaatggaagctacagcggtgttaaatctgtaacaataaaaaaataagcatgtaataacgcagcgataaggagacgtggatataaaatctgcgtctcttttctgcataaactatggctgcttaaaacgtgatatttctgagactgaaacaccggtgaactttgaggtgaattattttttcaccggttttgtaatctttagcccaaaatgctggataacgaggaaaatcgaaaagatttggatgagataggatctatcatcacaaataagatcaatcagccgccgtcttgttcacaagatggattcccagatacagttaaaaggtacactgggaagggaagcagattttattttacattgcagttaaaatcggtggaaagtgatctgctgcatgagatgacaccggatctgtccatggattttaccggaaaaggagtctttgtggtggaggataatgcattgaatatggaaattgcatgtatgcttttagatacatttggcattgaagttaaggaggtgtataatggaaaagaagcagtggaagatgtgcgtactacactgccaggatattatgatgcagaaaatggatggactggaggtaacgcgaatgatcagacagcctgacagggaggactgcaaaacacttccggtcaatgtcagtctgttaaaggagacacttgcgtcaatattgggttgatatttcagagtattggttaaaataatttagagaaacagggtagtgaaaaggagaaacagaatgcagacaggaaaaggtatttcaataccatccatcttaaaagttggaaaaggtgctttaactaaaataggcagttatttaaagaatgaaggaatcgaacaggccgttatcttttttggaaatggtctgatcgatatgtttggaacggatgtgatgaattcattaaagcaggaggatatcaaagtcttagaatacagtgaattggataccgtggatatcgacgaaatcattacactggcgtttgcaatgccaaataagacacaggcggtcatttccatcggtggtggaaaggtcattgatgcgggaaaatatgcggcatttttacgcaatcttccatttatcagtgtgccgacttccagttcgagtgatggattttccagtgcgagtgcatcccttcttgtccacggaaagcgcacttcggttccggcacggcttgcctacggcattattgtggacacacaggtcataagaactgcaccggagaagtttatctattccgggatcggcgatatgatctcaaagatcacagcactttatgactggatctatgaggaaaaatgtggttatagtgaagtgaatgactttgctgtcatgatcgcgaaaaaggcggtcaacagttttgtgcggacaccgtatgagagcatcaaagatgaactttttttaaaggagctggtggattcccttgccatgagcgggatcgccaatgagatcgcaggaagcagtgcaccgacaagcggaagtgagcatctgatctcacacgcattggataaaatattagaaattccgcagttacatgggattcaggtcggaatcgcaacttatatcatgagtaaagtgcaggatcaccgttatgtgcgtgtggagacggttctgcgggaaacaggattttttgattatgccgcgacgttaaagatgaagcgtgatgattttatcaaggcaatcgatatggcaccatccatcaagccgttccgccacacttatctgcatgaggaaaactaccgtgaagcggcaaaaaaactggtacttgaagatgaagttttaagtaagattctcgtataaaaacagaaataccggagaaaactaaataaaaatacaaatgagaaaagtaaatgttcctgtgatggggcatttactttttttatttatgacaatagaatgttcgcggagcgtgcattctattgttggaaacaaggtgaaaaacagggaggaaaatcctctgctcgctaatgagctcgcattttcctccggaaaacagggaggattgtatgattaaagaagatggattaccggtaggacttgggtttggattagcgatgaatgagaaagcgttaggacagttttccatgatgacagaagacgaaaagaggcaggtcgttgatgcggcgagaggtgcacagacaaaggagcagatggcgcagatcgtaaaagacattgcggatatggaatttttttagaattggagattatgatgggaaataacatggatttaaactatgagatgttctgctaccagtgtgagcagacggcaaacggaaagggatgcaccaaactcggtgtctgcggaaagacgccggagatcgctaatctgcaggatcttttgatctttcaggtaaaggggatcagctgctacgggaaagtgctgatggaaaacggtgcacatatggataagacagtggtcagttttattgaaaacgtgctgtttacaacattaacgaacgtgaattttgatgtggatgcacatttagaactgctacgggaatcacagcggatcaaagagcaggtcagggagatggcgggaaggagcagcaatccgacggcacatgctgcctacgatctgccggagagcaagagcgatatgctgcgcgatgcaccgcttgcgggaatcatgtacgacaatacattagatccggatatccgttccctgcgccagacaatcatttatggattaaaaggcatcagcgcgtacggacatcaggcaagagaacttggttattacagtgacgaagtggatgatttttatcttttggggcttgaggcgacaacagatgacagtctgacggtggaggagctgatccgcatgacgatgcgcaccggtgagatggcgcttgcggttatgaaaaaacttgatgaggcaaatacgacgatctatggaaatccatatccgcacaaggtggatgtgacaatcaaaaaaggtccgtttatcattgtttccgggcacgacttaaaagaccttgagatgctgctggagcagacaaaggatatgggcatcaatatttacacccacggtgagatgttgccgtgccacggttatgaggggttaaaaaaatatccgcatctgatcggaaattttggcggtgcatggcaggagcagcagaagcagtttgacaaccttccgggctgtatcctgatgacgacaaactgtctgatgcgcccgcgggaaagttacaaagaccgcatttacagcacgaacgtggtcggctgggaaggtgtgaagcatatcggaaaaaatgaaaaaggggaaaaagatttcagtgagattataaagcaggcattggagcttggcggatttagggaagatcaggagaagaaagagattttagtcggctttgggcatgccgcagctttaagtcaggcagataagatcgtggaggcggtaaaaggcggacagatccggcactttttcctgatcggcggctgtgacggagccagaccgggaagaaattattacacggaatttgctcagatggtgccgaaagactgtgtgatcttaacactcgcctgtggaaaataccggtttaataagttagactttggggaggtggcaggactgccaagacttttagatgtcggacagtgcaatgatgtatattcggcggtcaggatcgccacagcgcttgcggatgcgtttgaaactgatgtcaacggacttccgctttccatgatcgtttcgtggtatgaacagaaagcggtggcagatctcttggcacttttaagtctcggtgtccacaatatctatcttggaccgacactgcctgcatttttaagtccgaatgtattacagtatctgaccgatacgtttcatttgagacagatcagtaatgctgaggatgatattaagacctgtctcaaacaagatattgcgtaaaataaaagatgatctgcatgatgaatgaatagaatgtctgcggaaattttggtgtctgtgtaaagaaatcacgactcgaaaaatccaagctgctctaacgcataagcgataccatcctcgcttgcgcgttttgttacaaaagatacctgatcaaacagggaagccggggaagcatttcccatggcgacgctgtttggtacataagagagcatcggaagatcgttgttgctgtcgccgatcgcataggcggcgtcaagatccagatgataatagtcaagcacatactggatgccggtcgctttgctgtaaccgattggaacaaattcgcggaaggtaccgccgcggtcgatgcaggtaaaataaggatcgctgactttccggaattcttctaactggtcaggagtctgataccagaccacaaatttatcgcagaaaaaattcggattttccaaattctccggcatatcatagccgcggtttaaaaatgctttatactggtgtatggcatccgggtgtgagagggatctgcttttatcaaaggcaacttcttttctggattcgaaaagaatatccacattggttttgcgtgccgcctctaacagctgcatggtaatgctgtgtgtctgtgcaacgtgcagtgcctctgtgccggaacagaaaatatttgtgccgcatccgcagacatatccgtcaaaaccgatccgtctgaaacgtggttccacgttctgaaagcagcggccggtattaataaacatcagatgaccaaaggtgcgcgcatgtctaatggcatttatggcactcttcggcagggaaccgtcgatctccgaggttaaggttccgtcaatatcaaaaaaagcaatttttttcataggctgatctccgtaaaataatgatgataaatatttttaaccgaaagaattgtacggtatttttttcgaattgtcaaaatgaaatgggaaatggtataatgatcaggaaaatactgtgaaaacagcgtgggaatggaggattaccatgaaatatcatacgataaatgaactggatcatttttgttttaaggaggcatacattgcgcagatctgcgcggtaaacgggatgtttgaaatcgtatttgataatgtgacgattctgccggcgaattcctgcaaccgcgatatccgggagatgcgtgcaaatgaactggttttaaagatcagtgagccgaaaattgaagcactggtggaggaaggctataaagtctatgatgcgaacggcaatttaaaacagaaaaatgaggatattacgatcgcaccggaggcgtatgcagacaaattcaaagaattagagggctgtgaagtgtattccattgagcaggaaaacggaaattatgttatttccatcgatacggaggatcatacctttttgcttcgcatcagcggttccggggatacacaagagtgggatcgtttcctgaacaaataaccggagataaaaggagcatacgaatgaaaatattagtgacaggctttgaaccgtttggcggagcagtgatcaatcctgcctacgaggcagtcaaacttctccatgatgtgatagcgggggcagaagtgatcaaaattgaaatcccgaccgtgtttggaaaggatgaggaagtggtcagggctgcagtggagaaacatcatccggatgcagttttatgtgtcggacaggctggtggaagatccgggatcacagtggaaaaggtcgcaatcaatctgatggaagcgcgtatcccggacaatgagggaaagcagccgctcgatacaccaatccgggaagacggagagaatgcatattttgcgtcgcttccagtcaagagcatggtacagtatatgaaagaggcaaagatcccggcgcgcgtttcctatacagccggaacttttgtctgcaacgatatcatgtaccgtgtcctctacatgatcgataaggaatatccacatatgaggggcggatttgtccatgtcccatacttaccggagcagacgcttgatctgccggagggaacaccgagcatgccggcggagatgatcgcaaaggcattagcgtgcggcatccgggcgatcgttgagaacgaggcagatgtgaagacgatcagtggggagacgcactgacctggtgcacatgacaacgtgagtgtgtgacaaccggcaatcataaaaaagaatatcacgaaaaacgaaaaatgccggagtggtgcaaaaagatgtgtgccactccggcatttttatatgacacacttatttaacgctttcttcacataaccatcacattgcaatcagctgttctttaggttgcgatgttatttttgtattgtcaaaacggagcgcatgagtatggaaagtgaggaaggcaatgagaaaaccaggaaaaagaatggcaagtgtgatcgccagcatcgcagcagtctgtgtgatgaccggcggaatcggatatcaggctgcagtatccggggcgcagacagacagcacggaaagtagtgtaaaagatcagaatacagaccagcaggagagtacagacggctctttttcggaagaaggtaccacgcagatcggtacggtcagccagatgccggaatttacggtaaatgcagtcacaatgaccgtggaagaagtctatgcttcatccggggataccgtgagcataggggatgccctgtttaaactgacggatgagagcatggaagcggcaaaatcatattacgaagatgccatcagtgatgccgagaatacattaaaaacagccgaggcgaatcttgcaagcggaaaactttctgcggagagcacaaagcaggacgccgatctgacagctcagaccgcagcggacagttatcaggcacaggtagatgcgctagatgccgcagtggaagaaaaaaaagaagcctatgatgaggcggtagagcagatttcggaatatcagacgaagatcgataacaatgattactatgtggagtgtgcgattgatgaaaaaaaggctgcagttgatgcagcgacaacagcattagcgcaggcacaggatacgctgacacaggcacagcagtctgcagatgctgcacagagtacactcgaacaggcacagaaggaatttgactccgcggtcgaaacttacaataaaaatgtggaagaaaccaacactgaaattacggaactgacggatagtctggatgatttaaaatctgactatgaacaggcagagcgtgatgcgacaacgcagaaagcagaactgcaaaatgaatatgacactgcagtggtggaaggaaaatatgcgggaagtacctatgaatcgaccgtctcggaactggagagtgcagtggagtccgcgcaggatacacttgatacattaaaagaggaacagacagcacttcttgcattagaaaatggtgttgttacggcggatgaagatggaacgatcgcggcagtgccttatgaggcagaagatacgctgcagtcaggtactgcgtttgcgctgtattgtgatacacagacgatcatgatttccgtggaagtgccacaggagaatatcgcacaggttggcgtcggcgatgaggtatctgtcatgatagcaggaaaccgggatggagcagtgacaggaactgtctcatcgatcgcatcttcggcaacgaccggaggcagtgtttcgaatgttacttatgcagtgatcatttcaattgataattcggatggaagacttggttctggttcttccgcaaccgttacatttcagggagagcaggaggaaaaaacagaatgaaaaagaaaaaagtgacagtagttctttcattgggcgcagcagcacttcttttgatcggagggatcagcgtatatgcacatcagacttcggacagcggcgaatcagaaacggtttataaagaaacgacagcagaatatggaacgcttaccgtcgggattacagagagtggaagtgtgacaatcggaagcatttcacaggatatggctgaagatatcagtacgtcttcaaattctggcagcagccagacaagtggaacccagacaacgggaacatccaccaataattcatcggtggcactggaggtagaggaagtgtatgtttcggtcggacagcaggtaaaagcgggcgatgcactgttaaagctgacagatgagagcattgaaaaatacaggaaaaaattacaggaagctgtgacggaggcttcggcagattataactctgcagcactcagttcggcaaaagaaaaggtaagtgcgagttattcctataacttaagtgtggcggagggaagtgttgcacaggaagaatatgaggcaaccatcagtgaactgcaggatgcggtggatgaagcccaggaggcagtggatgagtcacaggcacttcttacctattatcaggaaatgatcgacagtggaatggatttaagtgagtcacttgcagatgagcagggaaattatgacaaactgtacaataaattaaaagcggcaaagagtgcatacactacaaaatctgtggaggcagagaaaaaatacaaagaggcaatgttatcctacgaaaatgcagacagccagtattccgcagatgtggcaggcgtggatgtatcagtggatacggcgcaggacacgttgacagatgccaaagaggctttatctgaatttgagatatttgtcggagatggcacgatctattcggattatgacggcacgatcatgtcggtcggatacgaggcaggagatgatctgtctgcaggcacgagcattgtgacatttgcggacacagatgcagtgacgatgacagtatctgtgtccgaggaggatatctctgagatcgcaatcggagacgaggtcatgatcgagctcaacgcttatgaggaccagacatttttcggtgaagttgaaagtattgatacttccgtatcgagcggttcttccacagtctcttataatgtgacggtaaaaataaatggtgacgtggacggtatttacacggatatgaccggaaatgtgacaatcattgaaaaacaggtggcagacgttgtctatgtttctaataaagcgatcatcaacgagggaacggcatcttatgtgaaagtcaaagacagtgatggaaccattgggaaaaaagaggtgaccaccggattttccgatggcgtcaatgtggagatcacagagggactttccgagggagagacggttctgatagaaagtcaggtgacgggcgaatgaaaccatcggaattattaagacttgtctggttcaatattacccagaataaatttaaaacaatcatgacgtcgatcggtatcattgtcggcgcggcaacgatcgtgatggtgattgccatcggaaaaggcggtcaggaggatgtggcagaccagtttaaaaacttaaatgcaggtgcaatcgacatttcctatgacggtggtgataaaaaccgtggtggaaatcaaagttccgatgactcctcagactcaggaatgatgatgatgccttccggcagcggtgcaccatccggcagcagttcatcgggagggtcaggggcttccggtggaccttcgggaggatttacgggcggtggcgactcttccggcggtggaccgtcgggtggccccggaggtggaaatggtggtgacggaggcggcatgccgggtgacatgggtggcttctttggcggcggcagtgatatggaagaccgcatgaaccaggaaaatatcacgttagatgaagatgacgtggacgatattgaaacttttgtctccgggatctcagcggcaacgatctcctatacgacaaggtctgccgtggatggcggtgatctcgatgaggcacagacctactcgatcgccggagtcagggacaactatgcagctatcagtaatctcagtcttgcagtcggagattttatcacagaatccgatgatgagaataaagaaaaagtctgcgtgctaggcgcttctattgcggaagagatctttggaagtgcaatcgatgcatatggcagtgtgatctatatcgatgaccgatcttatgtggtaaacggggtgctttcttctatgggtacggtggcttccggtatcagcccggatgattccgttttcattccgtatgcgaccggggtgaaatatttagtgggaacgaatgtaagtccgactatcaccgtgatcgcggaggacgtaagcaatgtgtccggtgtcacggaggagatcacggaagtgcttgcaacttcttatccgaatgcagaatttacctttgaggatgcgggaagcaagatggaagccgcatcggcgtccaatgagatattgacgatgcttctgatggctatggcagccattgtatttgtggttggtggtatcggcatcatgaacgtattgtttgtatctgtcaaagagcgcaccaatgagatcggtattttaaaggcaatcggctgctcccagaggaatattttgtttgaatttttagcggaggcggctgcaatcagtctgatcggcggcgtgcttggcattgtggcaagcctgctcgtcactccggtggcacagtatcttggtgtgcgtgttgaactgacaccagcagcattcctgattgcactgctgtttgcactcatcacgggaacactgtttggattctatccggcgtataaggcgtcgaaactggtgccggtggaggcgctgggggcagagtaaaagagggaaaggtttaaggcggttgatgaagaagaaagtaacgattgtggttgtaattgtattagtgattgtacttattgcggcatgtgtgatgtggcggataggtggagttgagacggaaagtgcgctgggggatcatcagaagtatgtctatgcgtatgtttcgtcgattgaggggaatgaagttacttatatggaagtggatgagtcggtggcgaaggcggcggaagaacgggcgaaggagaaggcaaaggcggaagatggtgccggttcggacagtacaggtcagtccggtcagatgcagatgccgcccgacatggacagcaccgagatgccgcagggcgcaccgggcggcatgtccgatatgacaggcgagacagtcacaactatgatacctgttggcgtaaccgtacatacaacatcagacactacgaccactttttcacgccttgcctcaggtgatctgctaaaaatattggtagaaacagacagtgacggcaacgaagtgatcgaagaaatctggatgttacagtaacgtaacggcagcatggctgattgtaaaactcatcaaaaactgaaaataattgtgaaaccagtgccagtttcacaatatcacaaaagtaaagctgagttttaaaatcagccatgcgagccacacacagaaaggagcacacatggacgcagcacaaatcctaaaaccatttgcaaatgaacatataccggcagacacaaaagaaactgccacagcagaacacacatccgtgatcatcaccatgcaaaatgtaaacaaatcctacaagatgagatctggttccctgcatgtattaaaagacatttccctgaccgtcgaacagggagaataccttgccatcttagggccatccggttccggcaaaagtaccctgatgaacatcatcggctgtatggatgtcttagacgagggaacctataaccttgacggtgtggagatcgaaaaggcaaaggaaaaagaactgaccaatatccgcaaccagaagatcggattcattttccagaaatatcatctgattccgacctacaatgtacttcagaatatcgtcatgccgcttttgatgcgtggaatgaccttgaaggatgcaagagatgccagcatggataccattgcaatgttagggcttgcagagcgtatcgatcacaaaccgaatgagctttccggcggtcagcagcagcgtgttgcaatcgcgcgtgccttagtcggacagccgacgatcctcttagcagatgagccgaccggagccttagaccgtaacagcggaaaagaagtgctgaaactatttcagtgtctgagtgatatgggaaatacgatcgtcatgatcacgcatgatttaagcgttgccgaacatgcgaagagagtggtacgtatcgtggatggggaactctatgaaaattagaggtggttttcatctgtcctgtgtggtatgttaatataaaaggcatttggtttacaataaaaacaaggagagccgcacatgacaaacgaagagatctgcgtatggctaaaggcagaagcagaaccaaaatttcagaagtttacatccggtctgatccccggaacagatccgatcataggtgtgcgtatcccaaagctgcgcactcttgcaaaaaagattgcaaaagaggactggcgcgggtatttggaacacgctgcctgcgatacttatgaggagatcatgctgcagggactcgtactcggatatgcaaaaggagagattgatgagcttttggaatatgtgcgggcatttatcccgaagatccatgactggtcgatcaatgactgcttttgtgcaacttttaaaattgcgcagaaacaccgcgaaaaagtctggaattttctgatgccgtatgcgaaatcagatcaggaatttgagcagcgcgtcgttgcagttatgctgatggatcatttcctgacagaggcatacattgcgcgtgtgctggctgtgtgggacagactcgaccatccgggatattacaggaaaatgggagttgcgtggggcgttgcaactgcatatgcaaagtacccaaaggaaacacatgcatttttactggagaatcatttggatgacgaaacatacaataaggcgatccagaaaatgatcgaatcttaccggatatcggcggaggataaagagatattgcgcggaatgaaaaggaaactgcaaaaataagtgatattgtgcgaaatgaaaaggaaattgtaaaaataaaaggggagcagtagcatgagtgttgatacacaaaaaatcatagagatcgtaaaacaggtcaaaccgttatttttagaccgtgagggctcatcacagatcaaggtaaagggtgttgcggattttgtgacacagatcgattttaaagtgcaggagcaggtaaaaaccgcactctatgaactgtacccggaaattcagtttatgggggaggaaaaggacaacagcgatattgactttgacggtgatgtctggatcttagatccggtggatgggacgaccaacctgatccatgatttccgaaacagtacactttcactggcacttgcaagaaagggtgtactaacgcttggaattatatatcatccgtattctgatgaaatatttgtggcagaacggggaaagggagcattgttaaatggcagcccaatctccgtcagcaaaaggcataatttttccgagtgtctgatctccataggaacaagtccatattaccgcgaacttgcaaaagaaaatttcagaatttttgaaaaggtatttacggattgtgcggatatccgaagaattggttctgcggcattagaacttgcctatgtggcggcaggaagaatcgatgcatacttcgaacgcagtttaaaaccctgggattatgcagccggaatactgcttgtggaagaagcgggtggaaaagtcacggattataaaggaaacccggtggatatcaccggaaattccgatattgtggcgggaagccagacgatcggggagatcctggtagagaaatatttgtaaaaaagggagtcaacatgtctgactcctcttttagggtatcttctgtaaatatatgagtttcatatcctctcgatttttaaaatttttgttctttcgccggatattatatttccggtgtttctaccatagtttttctcgacatcatcctcttttcgttacttgttttcttagtttttatattttctgcttaacaagcataattataaggcgcgttttatatataaacaatataaattcttcttgacaagcatattttatggatggagaacatgcatgaaagcattttggtataacgatgatcgtaaaaatgtatgtggcatcaagatacgagaacttcgcaaggaaaaacatatttccacaaaaaaattagagattattttttatgtgttatccgactacatttttgtgcaataattacaaataccattaaaataacgtctttttgatgacatagtataagcaatatgctaaaatccattcaaagcatgacattctgaattatctacacggacatatgtgccattctattcacaggtcaaaatcataagaattttcaatgcttttattatccacacatttaagcagggagaattctaaagaaccagagatttctcccagacaacacagaggaggagaaatgaatggggacagcggacatcgtaacaaaagagtatatgcggggaaatgccgtatttgcggatgcatttaattatctgatttacaatggaaaaaaggtgattgacccggcaaatctgaaagagatcgatccgacagagattgcactgccgtttgatgatgaagcaaaagccggtaaagaaaaagatggtgaagataagaatagaaaagcgcagggaacagagtggagttctgtgaaaaatgaatcagtgagaaagaaaactgccggcagagcaggcaaaaaaacagatgcagtgcagagataccgtgatcttttaaaatttgcggtaatcaaacaggatgaaagaacgtcctatgttcttttgggcatcgaaaaccagacggatgtccattatgcgatgcctgtcagaaatgccatctatgatgccctgcaatatggcagacaggtggcggacatagctgccggacaccgccggaacaaaaatgatttttcgggaaaaaataatggtgagtatctgtccggatttttaaaggaagatcatatcagaccggtgatcacacttgtgattcattttggagcagaggaatgggatggtccgttatcattgcacgaaatgatgtcgacaagagatatggaactcttaagttttgtggagaattaccggattcatctgatcgatccggcaaaactgacggaagaacagctggatcatttttccacgagcctgaaagaagtcatgggatatatcaagtactcaaaaaataaggaacagctgttgaaatttttgcatacagatacccatagaagcatagaaatgaatgcggtaagagtgataaagacgatcacgaatacaccgattgaagtatcagaagaagaggaggagatagagatgtgtaaggcaatcgaggatctgatcgcggagagcgaagcacgtggcagagcagaaggagaaacacggggagaagcgaagggcatgatagaaatctgcctcgatatgagtttttccaaagaggatattttgaaaaagttacaggaaaaattaaatatatccctgcagcaggcgggggagtattttgagatgtatgggaaacatattgtttaaaaacaatataaattaatataattcttataaagcatgacattctgaattatcaacacaggcatatgcgccattctatgaacagatcgaaatcataagaattttcaatgcttttattactcacatatttaagcagggagaattcttagaaacccaaagatttctcctaaacaacacagaggaggagaaacaaatggggacagcggacatggtaacaaaagagtatatgcgggaaaatgccgtatttgcagatgcgtttaattatctgatctacaatgggaaaaaggtgattgatccggcaaagctgaaagagattgatccgacagagattgcattgccgtttggtgatgaagaaaaagccggtgaggataagaaagggaaagtgcaggaaacagagtggagttctgtgaaaaatggatctgtgagaaagaaaactgccggcagagcaggaaaaaaaacagatgcggtgcagaaataccgcgatattttaaaatcagcagtcatcaaacaggatgaaaagatgtcgtatgttttattaggtatcgagaaccagacggatgttcattatgcgatgcccgtcagaaatgccatctatgatgccctgcaatatggcagacaggtggcggatatagctgccgaacaccgtcggaacaaaaaagattttacaggcaaaagcaatggtgagtatttgtccggatttttaaaggaagactgcatcaaaccagtcatcacacttgtgattcactttggagcagaggaatgggacggaccgttatctttgcacgaaatgatgtctgtaagtgatatagaaattttaagttttgtggagaattaccggattcatctgatcgatccggcgaagttgacggaagaacaactaaataaattttccacaagtatgagggaggttatagggtatatcaagtactcgaaaaataaagataaattgttagaatttttgaggacagatgcccatagaagtattgaaatgaatgctgcaagagtgataaagacgattacaaatacaccgatcgaagtatcagaagaagagggggagatagagatgtgtaaggcaatcgaagatctgatcgcggagagtgaagcgcgtggcagagcagagggagaagttcgtggagaagcgcgtggcagagcagaaggagaaacacgtggagaagcgaagggcatgatagaaatctgcctcgatatgagtttttccaaagaggatattttgaaaaagttacaggagaaactaaatatatccctgcagcaggcgggggagtattttgagatgtatgggaaaaggacggtgtaattgtacattgaaaatgaaaaacgctgaatccatgataaatcaatggaaacagcgttttggcaaaatcaataaaacaaagcgttacatttcaaccacagcaacaccccatccgcctaagtcaattttatttccacagacgatggctgtttctgaaatcagctctacgccgttttttccgtggtgtgtgacagaaaccggatcttttgaatagttcagatagtagcacaattctttaccggaatcattgatgcctctttttataatgagtggataatgcggtgcgtctgaggaaagatctccaccggaaaagccggtttcgtgcaggaaagataaaagcacggattctaacagttcatcattttcaaacattgttccaaaataaagtgtggaaccatttccatattgattttttgcagcagctgcatagcgttcatatgccggatggctgtattttaataccggtacagcggtatcacaggtgataagctccatccattcacaggcggaggaggtcagggaaaaggcagagtcatccggatgtgaaaaatgctcctgtgcagccgccatgacatcgctttgaaccggcacgatatccacatgatgcgggtgtgtaaactgatcgtagtgaagtcccagacattcatgcaggatatgtggctgcatgtccggataaatctttaaatattcatcggaaaaaccgcttcggaatgtggtgatcagatgtccgccgtttttgacataggaatctaatgccagaagcagagattccggtgcgctgtagagtgccggtacgatcagacattcatagccggaaaaatcccgttccttagaagaaatcatatcgtattcaatatttaaccggtagagggcatctgaaaaccagcgcatcacagtgttgtagccgttggctccggcattttcaagcggaaactgtgtgaatccggtcagcgaggcattatcaagcataatagcgatcttattttccttttttaggttttttaaatgagaaccaatctttttccattcgtttccggtgatgacagcctcacggtaagtctcattttctgaaaaatcatgggagagcacacccttccagtaactttcaatcgcattgtggatcgaatgccagtgccagtacattacactgttagagccgtttgcgatatggctgtatgcctgcaggcggagctgtcccggataaggaagccacggagtcagtccctgagcctcggtctctaagatcagataattgtcttttttcagacttcgtgagatatttccacatacggtgatctcagcaccggtcagttcttcattggaaggatgataaatatcagcacctgccactgtcatgcagcgggctgcatcgtactggtcgacctgggactggtaaccgaccgagtgtgtggtccagtcaaaatcaaaattctgcgtgataaactggtcgtcacgtttatattcacggacaatgtcagcctgccagctcaaaaattttgtgacaagcgaacgctggaatttataaaattctgcggcaagactctgattgatcgtacctctgacatccgggaaatcctcccagtcattcacacggttgctccagtaatcgagaccgaattcatgattaaattcgtcgatatccggaaatttttcttttaaataatccacaaacattgcctggacacggggaccggcagttccataacttttggtttcattgtcaagctgatagccgatcacatgcggtacatcctttacatgttccatcagaacacggatcacacgctctgcatgggagagataatccgggtttgtgatatccatattctggcggtggccgtaacgttcgcggccgttctgggtgattgccaggatgtccggatatttttttaccagccatgtcggtacggcataggtcggtgtcccgacgatcacggaaatatggtggcatgcggcagcatttaacattctgtcgatatgtgtaaaatcatacacgccttcctgcggctctaaagtactccatgttgattccgcgatacggatgacattcattcctgctttttccatcatttccatatccttttccacacggtcgtatggaaggtattcggaatagtatgcagctccaaaataaagtttttctgttttcatataaaacccccaccgccggatgacaggttcgtattgtctggccttagaagcagatttgagcactgtggcggtgatatcctttcttaatttaatataaaatgataaaatgaacaaccgcttgcgcattcttattataccatctgaaaatttacatgtaaacgataagaaacagtttccaaaaaaatatctatgatttactcggatatgataaaaaatggtgtagacagtgaacttttaatttgctaacataaaatcaatactggaagtgtatattgcagggagggtcaaacatatggaattaaatcagaatacagaaaaactggacaattatagaaaacgtgctgcagagctggtcgggaaaatgacactggaagaaaaagtggcacagactctgtatcaggcaccggcggtggaacggttaaatataaaggcttataactggtggaatgaggcattgcacggtgtggcgcgggccggcacggcgacggtatttccacaggcaatcggtctggcggcaacatttgatgaggatttgttagagcaggtcggtgatgcagtgtcgacggaggcacgggcaaagtttaacatgcagcaggagggaaaggatacggatatctataaaggcctgactttctgggcaccgaatgtcaatattttcagagatccaagatggggcagaggacatgagacgtttggggaagacccatatctgaccagccgtcttggagtccgctatattgagggtctgcaggggcatgatgaaaattatttaaaggcggctgcctgtgcaaaacattttgcggtacacagcggaccggaagcggtgcgccatgaatttgatgcagaggtgacggagcaggatttaagggaaacatatcttccggcatttgaggcgtgcgtaaaagaaggaaaagtggaggcagtgatgggggcatacaaccggacgaacggagtgccgtgttgtggaaacaaacgtctgctgatcgatattctgagaaaagaatggggattttcggggcatgtgacgtcagactgctgggcaatccgtgatttccatgagggacatcatgtgacaggcactgcgattgaatcggttgcgatggcgatgaataacggctgtgacttaaactgtggtactctgtttggatttttagttcaggcggtgagacagggactggtcaaagaagaacgcttagacgaggctgtcacaaatctgtttatggcgaggatgaaacttggtgtgttcgataaaaaagaagaaaacccatacgataaaatcccttatcttgccgcagacagcagagagatgaaaaaattaaatgaggcggtggcaagacgaaccgttgtcctgctaaaaaataaggagcatatattaccgcttgataaaaataaaataaaaacggttggcgtgatcggaccaaatgcggacagcagacgcgcgttagtcggcaattatgagggaacggcatcacgttacattactgtgttagaggggattgaagattatgtcggcgacgatgtgagggtgctctattcggagggctgccatctttataaggaccgcaccagcaatctggcacaggaaaatgaccgcatgtcagaagtacttggcgtatgcaaggagagtgatgtggttgtcgcagtgctgggacttgacgcgggcattgagggagaagagggagatgccggcaatgagtacggcagtggtgacaaaccggatctgaacctgccgggactgcaggaggagatcttagaggctgctgtatcctgtggcaagcctgttattttagttctgctatcgggaagtgcacttgcggtgaactgggcggatgagcatgtagatgcgatcgtacagggctggtatccgggggcaagaggcggagctgccattgcggatattttatttggggaagcaaacccggaaggaaaactgccggtcacattttaccgtaccacggaagaactgccggatttcgaggactattccatgcagggaagaacttaccggtatatggaacaggaagcattgtatccgtttggctatgggctttcctacacagagtatgcatatcaaaatgtgagatttttagagcaggaaccagtggtgtcagaaggagtgacgatcggtctgtctgtaaaaaataccggaaaaatggatgggactgagacagtgcaggtctacgtgaaggcagaacattcaaagatgccgcatggccagttaaaaaagatcgtaaaacttccactctgtgccggggaagaaaaagaaatcaatatccggctggaatcagaggcatttatgctgtatgatgaaaacggtgaaaagatcctgccgtccggacacttcgagatttttgtcggaggcatgcagccggattcacgcagtgagaaactcacaggaaaaacagtggaaagtctgatgttatgaaaataattgtgcgtctctgtaaaaaaatcgaagaaaaaattgacacttacagcatacaaaagaaactgattcttttgtatgtctgttgtgtggtcctgccggtcgccctgacagacagtgttgtagtcggaatgatattttcggaggaacacaatgcaagaaaacaggtgacagaaaatatagcgagtgcggcagagtacagcattgacaaggcagtagaagaagcactcacaatctcaaaaaatatttatatgaataagtatatcaacaattttctgaatgccgattatgattcccatctggcattttatgaagcgtatcaggagctgatgcaggattccctgtttgacagttcacttggcaacagcagcgttgagatcacgatgtatgccgacaatgatacgatcgtaaatggtggaaagttcaaaaagttaggacgtgtaaaacagacggaatggtatcagaaattgcaggattccgggaacaattttgtattttgtgcctacatggatgaaacgcacgatacatctccgacggatttaagaaaggtgtcgattatccggaaattaaaccgttatatgttagatccgcatgaaaaagttttaaagattgatctggattataatgcggtcaataccggacttttgagggcaaattatgaatcagaggtgtatatctgcagcagtgataagattatcttttcaaataccggaagaaacaatataaaagaatcttttgagaggtttgataagggtaccatgcacaagtgttatgtgcaggagaaagaattatacggacagccgatgaagatctatgtgcggtatccggaaatacagatctcaaaaattttgtggaacaatgccatacagatgatcctgctggtgttgatcaatatttttctcccgtgggtatttatgcagtttctaaaccgttcgtttacagtacgtctgcatctgttggaagataccttttcgcaggatcataccggaaaattaaaagtggtggaaacaatatcaggaaccgatgagatcagccagctgatgcagcattataattccatggcaaaccggatgaatcatctgatcgagacggtttatgagagcaggttaaaacagcaggagtcggagattgccagacaggatgctgatattgccagacaaaaggcggaacttctggcacttcacagccagatcaacccgcattttctattcaatgtattggaaaatatccgcatgcggagcatcttaaaacatgaggatgagacagcggaaatgatcgaacagctttcgctgatagaacggcagtatgtggagtggggaacagatattgtgagccttggtgcggagatcggttttgtggagtcgtatttaaaacttcagaaataccgttttggtgaccggctaagatacagcattgaaatggaggatgactgcagggagtaccagattcctaaattatcgttagtgacttttacggaaaattcatgtgtgcatggtattgagggaaaagcgtcacagtcatggatctttgtccgtgtatataaagataaaaataatctgcatcttgaagtggaggataccggggaggggatgccggaagaatatctgaattatctgcaggaacgcatggaagaggcaaatatcgagatgcttaaagaaaaaggacgggtaggtgtgatcaatgcctgcgtgagactgaaaatgtatacaggagatcatgtaaaatttcatatcgaaagtgaaagaggtgttggaacagaagtatctgtagtgatacctttgaatgcaatttcataaaaaggagaagatagggaaaattttatgggagaaagaatggaggggatagaatgcttaaagtgctgcttgtggacgatgagccatttatcgtacagggactttctgcgttgattgactgggaaaaagaaggatttgagattgtgggaactgcggggaatggcagtgaggcggtagaatttttaaagagtaatccggtcgacctgatcttagcggatatcaaaatgccggttatgaatggtctggaatttttaaaatatatcagggaaacgcatctgtcagaggcattttttgtaatactgagcggttatggagactttacctatgcgaaagaggcaatcaaatggcagtgtacggattacatattaaagccgatccagaaaagccagctccttgcactgctttcaaaggtaaaacagatgcagcaggataaaaaggaagagagcgagcgaatccggaaaatcggaaaagcgtattttgtgcagcagatgcagacacttttgctcggcagacaggaggaaacggcactctcttatgttaaaggacaggtggattttggaagagggatccgctatatcgggatcgagtcggaggatggcgagacggatacggacataggaccggaaaagaaacggcagctccagagacagatatatgaagcctgcatgcagtatcttggaggtgaatacagctgtcttacattcttagacgcggaaggcaaggaagaatgttatgatgtgggatttattttctgcaaaaaaatttcgcaggaaaagggactgcgggagcaggaatatatcaatctgctattggaaaagattcagaaaagcacagtccatccggtcgtgatgtatgtcggcagtgaggtggaagatatcagtgatatctcagaatctttccggtcggcagtgatcgcaaagactttttccaattttaaggtgatgccgaatctattgtactattcgaaagagcagaaaaatccgtccggtattgtggtgagccacaaaaaaatcgaggatctgctgcggagtgtggaagagaatgacaagaaaaggatcgaggataatgttgcagcgatctatgaggagatgaatgaggcgggaatgaacccggaattggtacagatgaacatgaattatctcctgtaccgtctggtttcccttgcgatggagcaggatgacagcgtcaatcaggatgaggtgttacagtatatctgcgaaaatgcgtttcaggtacatatgatccgaggaagcctttcacatttccgcagattcgtcatggagtatgcggattatctggtacagttaaggcagaatgcgtcccgcggtgtgcttcttgatgtggagggggagatccggaaaaattatgcagagaatctgacgctcaaagaactcgggaagaaatattttgtcaacagtgcttatttagggcagatgttccggaaaaaatatggtgtatcgttcaaggaatatctgaataattacaggatcgagcgggcagcggagatccttcttaggacggatgataaaatctatcttgtggcggaagaagtaggataccgtgatctggattactttattaaccggtttatccagagcaaaggatgtacgccgacaacgtaccgcaagaagacacgcagtgtaaatgaataaacgaggacaatagtacctgtgatagagagtcatgacagattttagatgaaaaactaaaatttgtcatgactttttttgatttttgtccggttgtagaaaaatgacaaattggtaaaataaaattactaaatctgatacagatcttacagaaatcagatgtgattaagaaggaggagaaaaaatgaaacgaagaaaagcagtgtcagtattgcttgttatggcaatggcagcgtcaatgcttaccggatgtggcgggggaaataccaataccacaggaacaaatggcacagcatccacagagggaggctcatcaggggaaaacacaaatgattcatccggcgtgaaagagtttaccgcattttttgcagtacctggttcagagatcaatgatgacaatgaaatcgagcagaagatcgcagagatcacaggtgcaaaatgcaaggagacatggctgaccggacagacagcacaggaggcagtcggaacactgatcgcaggcggtgagtatccggatatgatcgatggcggcgacggaatgaaacagctctatgatgcgggtgcgctggtagcactggatgattacatagacaaatatccaaacattaaagaatttttaacagatgaggagtgggataaactccgtcaggatgatggacatatctactggatcaatcagtttggaaatatttacggggaagaaaaagcaaccacccacaatgacgaggcattctggatccagacgagagtgttaaagtgggcagactatcctgagatccatacgatggatcagtattttgacctgatcgagaaatacaaagaagcaaatccgaccatggatgacggaacagaaaatatcccgtacacgatcctctgcgatgactggagatacttctgtctggaaaatgcaccacagtttttggatggctatccaaatgatggaagttgtatcgtagacccggatgaattaaagatcgtagattacaatacaacaccgacagcaaaacgttacttccagaaattaaatgaagagtaccagaaaggaatcgtagatccggagtcttttacacagacctatgatgagtacattgcaaaattatcaaccggtcgtgtacttggaatgatcgatcagtggtgggattttgcatacaacgtaaatgatgcatttaagcagcagggacttgacaaggaaggctgcaattatgtaccgcttccgatcacgatcgacgaaggtatgaagaaccagtggcacaactccggcggaacattaaatgtgtcaagtggtcttgcaatcaccacaagctgcgaagacgtggagggcgcccttcagttcatcaatgatctgttagaccaggaagtacatgatcttcgtttctggggcgaaaaaggtgtggattatgatgtggatgaaaatggtgagtattatcgtaccgaggatatgagaatgcagtcctccgacaccgcttacaaggcatcccacagctgttcatattcttatttcccacagtattccggtaccagccgtgacggcattaatgcaatgaaaccggagtatcaggcaaaagagttctatgacggattgagcgaggacgtacagaactgctttaaagcatatggcgcagagacttatgtggatatgcttggaaccagcgaggcaccgggaccgtggtatccgatgtattcctattcaaacaacatgacgactgcaactgagggcggcatggcatggacaaagatgggcgaagtaaaacatgaataccttccgaaggtcgttatggcatctgactttgacagtgcatgggaagagtacatgggtgtctacaataactgtaatccgcaggcatttattgatgagatgcaggcagaattagaccgcagaattgaggaagcaaaaaaatatcagtaaaaattgtgagaaaacgggatggggactggacgaatgacagtccccattcttaaaaaagaggagtgaaactatggcttcaataacagtaacgaaaaaaaaacaaaaacaaaaaatcaaagagccgcagataaaaatcacatggaaagaaataaagcggcagaaggttcttttaatatggtcagcgatcatcgtagtgtatggagtgatcttctgttatctgcctcttggcggctggctgatggcttttcagaattataaaccgaaggatggcctgcttcattcttcttttgtgggacttgcaaaattccagcagttattttccgatgcaacctttttgcgggtaatcagaaatacacttgccatgggtgtgatcaatctggtcgtcacctttgtgatggcgatcgtatttgcaattttattgaacgaggtaaaatcacagggaggaaaaaaggtcgtacagaccatttcttatctgccgcatttcctttcctggattattgttaccggtattttacatgatgcattatcgggcaccggtattatcaacgaacttttagtgaactttggtattttagaccagcctctcaacttctttgcatatccgaaatacttctggccgatcgtggcatttgcaaatgtatggaaagagacaggatggaatgcgatcatctatttatctgcgatcacagcaatcgatccttcactctatgaagctgcaaatatggatggtgcgggccgctgggcaagaatcaaatatgtcacacttcccggaattaagccgacgatcatgatcttacttttaatgaatgtcggaaacgtactgaatgcaggttttgagatccagtatctgcttggaaacggtctggtacagagcgtatcgcagaccatcgatatttatgtattaaaatggggcatcagccagaatgatttctccattggtacggcagccggtattttcaagagtctggttagtatcattctgatcgtgatcgccaatcagatcgcaaaacgtaacggcgaagaaaggctgttttagggggtattggtatggaagcagtaacaacaaagagaagaaaatcaagaaagaaaacatccgttgcggacaaagttttcgtaacgttaaatacattatttatgatcatgtttgtgatcattacgttatatccggtgttaaatacgctggcaatctcactgaatgacggaacagatgcgctgcgcggcgggatctacctgctgccgagaaaatttacatggaaaaattatattaccgtgctgcagaaagacaacctgattatgggtgcctacatcacggttgcaagaaccgtcatcggaacagcacttgcactgtttgccaacgcgattctggcatttattgtcagcagaaaacgtttcatgtttaaaaaacagttatccctgttctgggtgatcaccatgtatgtcaatggtggaatgatcccgaccttcctgttatttaagacacttcacctgacaaacagtttctgggtgtatgtcattccgggaatgttcagcgcatttaacatgttagtcatccgtacttatatgaatggtatctcagacagtctggaagaatccgcgcagttagacggggcaggttacaccacgatcttcttaaagatcatttccccgctctgcaaaccggtatatgcgacggttgcactgtttgtcgcagtcggacagtggaattcatggtttgatgcaatgctctataaccgtatgagtgcgaacctgacaactttacagtatgagctgatgaaattattatcttccgtcacaaaccagggaaattccgtggaggcaatgaaaaatgcggcaggatctgtgacaccgacttccgtgcgtgccgctgcaacgatactgactatgctgccgatcatctgtctgtatccgttcttacagcggtattttgtgacaggacttaccattggcggtgtcaaggaataagaggaaaggataaagttgcatgaaaagaggagcgtttgagactggaacttaccgcaatgtatttgcggaggcaggctatgataaggaaaccatagaaaagcggaaaaatgagatcttccatacacttttttacggggcagaatcagagcggatctatcatcccgtcggggacgatatggcatatatcgaggacacgggtaaccatgatgcgcggacagaagggatgtcctacggcatgatgatgtgtgtccagatggaccggaaagaagaatttgaccgtctgtggaaatggacaaaaacttatatgtacttagaggaaggcgaaaatgcaggatattttgcatggtcggtgcagccggatggaacaaaaaattcttttggcgcagcaccggatggtgaggaattttttgcgatggcactgtttttcgcagcgcaccgctggggagacggcgaagggatattcaattacagcagggaagcgaaggagttgctgcacacctgcatccacaagggagaaaacggagagggtggcagagccatgtgggatgcctcaaatcatctgatccgttttatcacggatgtggatttttcggatccgtcctatcatctgcctcatttttatgagttgttcgcactgtgggcaaaagaagaggaccgggcattttttaaggaggcggcggaggcgagccgtaattacttaaagcgtgcatgtcatccggtcactggtcttagtgcggaatatgcagaatttgacggaacaccgtatcagcctgttttagaccagtggggaggcagacatgactggtattacagtgatgcctaccggacgatcgcaaacattgcccttgactatgagtggtttgcaaaggatgagtgggagagtgagaatgttgaccggtttttgaattttttctgtgataccgtgcaggagaaagacagggacggtattttcctgaccgacggaaccattctggaaggaaaggcactgcatccggttgcgatgactgcggtcaatgcgcaggcggcacttgcctcagaccagaaaaatgcatttctctgtgtccaccgtttctgggagacaccgcttcgcactggggacagaagatattatgacaactgtctgtatttcttcgcatatctggcactgagcggcaattatagaatttattaggagtgctcgtatggaagcaattttggtaaaggatcaaaaagcggcggcatttgtgatggaggatgggacatttgagggtgtctatagaatcacagaaaaggtttgtggggatgtggagcaggtcacaggtgtccgcccgaagatcataaaatggcagggagagttgcagtcggcgcaggtgtatgtggcaacgctcggaaacagtgagatgtcagaggcgatcgcagaagaggaagggatagaactttcctctctgtgtggaaagcgggaatgttttctgtttcaggtgttgaaaaatggcagtctgctgatcgcaggaagtgacaagcggggaacaatctatgggttattccatatctcagagcttatgggggtatcgccgtttgtccactttgcagatgtggtccctgccccgcagaaagaaatcattttttccgaaaaagactcgatgcagagcaaagaaccctccgtgaaataccgggggttttttatcaatgatgaatggcctgcgttcggaaactggacattttcccattatggtggatttactgcagaaatgtatgacctgatctttgagacactgcttcggctgaaaggaaattatctgtggccggcaatgtggacatcgtctttttcactggatggaccgggggaggaaaatgcccgccttgcagactgctacgggatcgtgatgagcaattcccaccatgaaccatgtttaagacacagcgaagaatgggatctggtgcgtggagaggattctgtttatggaaatgagtggagctatcttaccaaccgtgagggactgatccgttactggcgcgacgggcttttgcgcagtggaaaatatgaaaatatcatcacgatcggcatgcgtggggagagagattctctgatgcttggggaggatgcatccttagagcagaatatttccctgttaaaagagatcatcacagaacagagaaaactcatccgggaatgtgtcggggagaatgaaccggaaatgctcgcactttataaagaagtggaggcttattattacggggatgagacaacgccggggcttaaagactgggatggcttagacggtgtgacgctgatgctctgcgaggataactatggaaatatgcggacacttccgacggaggaaatgcgctcccaccgcgggggctttggcatgtattatcactttgattaccacggatcgccggtctcttatgagtgggtgaacagttcttatctgcctaaaatctgggatcagatgacgatggcatatgactttggtgtgcgggatatctggatcgtcaatgtcggtgacctgaaatttcaggagtatccgctcagtttctttatggatctcgcatatgattatgagaaatggggaagcagcaggattcatgcgccgcaggattatctggcgtactgggtgaaacgtgaatttggcggatggttctatgaggcgcagcagaatgcagtttatcggatcatgcagcagtatacaaaaatgaatcataactgcaagccggaagcgatgcgcgcagatacttatcatccggtgcactttggggaggcagacaaaagacaaaaggaaaatgaaaggttagaagaggagacagaaaagcttttatcttctgtgccggaagagatgctgccggctttctgggaactggtatattacccggcaatgggaagtgcaaacgcatctgatatgcagctttatgcaggaaaaaattcattttttgcaaaaatgggagcggtatgtgcaaatgattatgcagaaaaaataaaagcatgtatcgaaaaagaccgtttactcacagaacggtttcatcagcttctggatggaaaatgggatggaatggcactctcagagcacatcggctttgtgaactggaacgatgaggagtgcaggtatccgctcatgaccttcatagaaccggcaaataagccgaggatctttgccatgtcagagggcggtgatgtctgtacggcaggcggggactggacgaaaaaattgatcgtgatgcggcagtttttagatccggctgtcagtgaagcctccctgttattgtttggcggctcgaaagaaaaagtgccttatcatatcgagtgcaaaagtccgtgggttctgcctggaaaaatgcagggagtcacagaccgtgaggaagtgctcacggtgcagataaaaagagatgagatcacagactgggagaatgaccacaggacatatgattttgaggtttgctatgagggtggaaggataccggtaaaaattttgctgaaaaaagatctgccgggatgtccggcggaggcattttatgagacagacgggatgctctctgtcgaggcagagcactttatctgcaatgaaaaggcggatgcgggagcattttatgttttgccggagtacggaaaaacgttatctggtgtgaaagcatatccgcagacaaagactttttttgaaatggcagagcagatcagacaggcaccaaaactgacgtatcagatctatgtcagggaggcgggagaatacgaaatgatttgctataccgctccggcaaatccggtctgtcagggaggcagtgtctattttggctgcgccgtcaatggaaatgcaccgcaaaagatagagatgattccggatggataccgttccggcgagccgtcctgtgcggaatgggcgaaaatggtggtggatcagatccgcgttgtccgtgtgcaggtcacgctgcagagcggagagaatgaaattggaatttatgcggggacaccgggatttctgctggaaaaactgacgtttgtgcgcaagggaaagcatttgccggagtcaggtcttggactgccggagacaaggaggacgaacagatgagtggacctgtggcaccgaaagatccggaaaaagacagatcttatttttacattatgaaagaaaaagaaacctttggctcgctccagacgcagggggagtatcagggcaggggagtccagtttatctacgagagtgatggaaggcttgaaagcagtgcggaagtgaccggtgaggtctgtgatgaagaaattttaaagaaacttggcacggtggagggctttaaaagcctggtgcacagcatcggtatatccgtggagatggaacatagcagagaaccggtcacatttgtatttcagatgtacgggaaagaggatctctacggcggcggaacgctcatagaaacagaactgcgtggggatggcgcagaagtcaggatcacgcttgatacggtaaagtggaaaacagatgatgatgtgccggggcagatccggtttgtctttgagacgccggaacagtctgcaagggtcaatgtccgtttctttttaaaggatggatttttcgtaccaaagccgcaggaagagcgcgtggtggatatggaatcccacggatatcaggaaatgatagagcggtcactcctttctatgggagatgcgggcaggatcagaagagtcgtagaaaaagcgcgggctggggagccggtaaccatagcatatataggaggatccatcacgcagggagccggggcagttccgcttcacacacagtgctacgcataccggttctggaaggcatttgccggaaaatacggaaaaaataacaatgtgaaactgataaaagcgggagtgggcggaaccccgtcggagcttgggatgatccgttttgagagggatgtcctgcgggatggaaaagaaaagccggatctggtagtcgtggaatttgcagtaaatgacgagggggatgagacaaagggaaggtgttatgagagccttgtaacaaaaattttatccatgccggatgcaccggctgtcctgttattgtttgctgtttttgcaaatgactggaacttacaggaacgccttgctccggtgggagagcggtatcagctcccgatggtaagcatccgggatgccgtgacaccgcagtttcggcaggcaaaggacagagttgtttcaaaaaatcagttcttttatgatgcgtttcacccgacaaatctgggacataaaatcatggcagactgtctgatgtatctgattgaccgggcggtctgtgagcctgatattttaagaagaatgcatgaaaaaccggtttatggggatgaatttgcgcaagtgaaattattagaccgcagagacggctatgaacgtgcgaagatctgctgtggcgcattttccggtacagatcaggaattacagtgtgtggagatggatgacagtttaacgccggttcctgaatttccgtacaattggcagtatgatggggcaaatggcagatcagaagatgcattccagatggatatctactgccggtcactgcttctcatctttaaagattccggagcggtggacgccggacgggcagatgtgtttgtggacgataccaaagttctgaccgcagatccgcatgtgaacggctggacgcactgcaatccggtcattcttctggaagaaaaagaaagcggatggcatcaggtgaggattcagatgacacctggggaagaagaaaagaaatttacaatacttggttttggctatgtggaataaaaaaggcatggctgcctggaaagcagagaaatttgtgtgaaaaataagattttagaatagtagaaatggagcgataaaatgagtatagcaaagaatccggttctgtccggtttttatccagacccatctatctgtagggtgggggaagattattatatggtaaattcgagttttgcatattttccggggattcctgtgtttcatagcagggatttagcgcactgggagcagatcggcaatgcgttggacagggaagaacagcttccactgtccggcagtgagatctcacgggggatctttgcaccgacgatccgttaccacgagggtacttattacatcataacaacaaatgtggatcatggtggaaactttgtgataacggcacaggaccccaaagggccgtggtcagttccacattatctgggagatgcggcggaggggattgatccgagcctcttttttgatgaagatgggaaatgttattatgtcgggacaagaccgaatccgtccggggtcagacacaatggtgactgggagatctggatagaggagctggatcttcatgcaatgtgcttaaaaggtgcggggacggcggtctggaaaggtgcattaaaagattgtatctggccggagggaccgcacctttacaaaaaagacggctggtattatctgatgatcgcagagggcggtacgggaccggaacacagcatcagtatcgcgagaagcaggtcgttaagagaatggttctgtggatgcaagagaaatccaattttcacgcaccgcaatcttggcagggattatccggtgatctatgcaggacacggagatcttgtggatgatgcagacggaaactggtatgtcgtcatgcttgcatcgaggccatgtgagggacactgtagtattggcagggaaacttttctggcaaaagtggaatgggaggacggatggcccgtcatcaatccggggattggacatctgacagagaaaacagaacttccgatcggtgagtatcgcctggaaagggaagtgacccacgcggattttattgcatttgatcagaaaaaaatagatgacagactcctgtcgctgcagagaagggatgaaaatgcatattcactgatcgagagaaaaggttttctcaggatgcatctgaaaaaacagaaacttacagagaaaacggacgcgcagtatttcgggctgcggcagaaagattatgattttacattttcggcatgcatggaatttgatgcggagcgggaaaatgaacaggcggggatcgtctgctatcagaatcatgcaaatcatctttcgatgcgcatctgcggtggaaaagagaagagaaagctgcaggtaatcgcacatataacagaaaacgatacgctgcttgcggaagaagaaatcaatgcaaaaggaatgctggaactgtatttgaaggcagcaggacagagggcagaattttttgtcagagatgaggaaggaaaggtattaaaactcattaaagacgtgagcctgctgccgtacagtacagaggaagcagggggatttgtgggctgcacgctcggtgtgtatgcgtcttcaaacggtgaaatgtcggatcgttttgcggatgtagcatggatttcgtatgagggaataccggattgatgccgggaaaaaatagaaaaaaataggattgatttttgcccctgtttgtacaataataaacttagttgcgcaactaagcgcaaaaaagcgagggacgagagtttatggataaggggttagaaaagaatattacgattgcggacgtggcggaggcgcttggggtatcgaagacaaccgtgtcacgtgcaatttccggtaaaggtcgtattggcagggagacaagagagcgcgtgctcgcctacatagaagaacatgattataagccgaatgtcattgcgaaagggcttgcgcagtctaaaacttataatatctgtgtggtcatgccgggggagtatgatgttgtggatcttacattttttcaggaatgtctgtttgggatacaggagattgcgggcagcatggaatatgatatcctgctttctatctgcaggaaaaacgatatatcttctcttgagcgtatcatagcaaaccataaagtggacggtgtgatcctgatgcgcacttttgtggaagatgaacagatcgattttctgcagacaaaaaatgtaccgtttgtcacgatcggaagtaccagtgccaattacaaaggcgtgattcagatcgatcacaatcacaagagtgcatgcaaagagcttacatcgatcattttgatgaagcagatggacaaaattgcactgatcggcggcaatgaagagcatgtggttacacagagccgtctgcggggatttcgtgaggcatatgcgaagatggggaaaacgttagatgtggatctgatgtttttaagccaggataaccaggttctggtggaaaaggcagtcaaggaagcattaaacagacaggcagactgtatcctctgtatggatgacgctgtctgcagccgtgttttaaagacactgcgccagcagcatgtcaaagtgccggaagatgtccgggtggcatcgttttataacagcatggtacttgaaaacaatgttccctcgatcacatcgctttcatttgatgcaaaggaactcggcatggtggcatgccgtacactgcttgatctgacggagggacttgaggtgaaagagcgtacattgcttccgtatgaggtggtgctgaaggaatcgacgaaataaatacaatcaggaaaatacagttctgagaaaattgaagatcatcctattggagagaataagcaatgggcgaaacacatagcgaataaatgtgtttcgcccgttttttatgctgaaattgtcggaaataacgtgaaatgattataatgattaccggaataacccacagatcaggggaaatgagggtgaaactgaagcaatatcagggaaattcgcccaaaacaaaggaaaaggcaggaaaatccctgattcaaaaaatatcaaaaacgagccaaaatgtccataaaaagatgatataagaattgaaaatgcacggaaaatcaatggttaacggttgcgcaaaagtcgaatttgaaaaaaataaaagaaaaaatagaagatgatattgtgcaaaatggctaaaaaatggtcggaattattataaattatggacattgacacaaggatgtaacggagatatactctaaccatagaacaaccgattgcgcatagcgcaacacgaaaaagtgttctataagaacaattttttctatcaaggaaaagggaggaattttcaaatgaagaaaaaagtcatcagcacagtattatgtgcagcaatggtagcatccatgtttgcaggatgtggaaacaaagcagccgataacagcagcgcagcaggcaatagcgcagcagataacagcgcagcagagagcacaaacgatgcagcagcaacagagacaggtgatgctgcagataatgcagaaacagcttccggtgatgcaatcgcaaatctgatcgcagcaacagacggaaccgtagatatccagctctggtgttcagaacttgagacttatcagaacgttatgaaagagctgacagacaaattcaaagagcagtactcagatgtggatttcaatatcacaatcggtgcagtatctgaacaagaggcaaaagacaagatccttgaggatatcgatgcagcagcagatgtattcgtatttgcagatgatcaggtaaatgatcttgtaaatgcaggtgcgcttcaggaagtggcagctacttatacatatgatccgaaagaaacaaactcagaggctactgtagcagcagctaccaaagacggaaaactttacgcttatccgttaacagcatcgaatggttacttcttatactatgattcaaacatcttctctgaagaggatgtggcttcctgggaaaaccttacagcaaaagcggaagaagcaggaacaaaagttggcatgaatgtagcagatggatggtatctgtatggattcttctctggtgcaggctgtgaactttccatgaatgaagataactcaaacaactgtgactggaactctgagaccggtcttgcagtagcacagagcattgagaatatcacttcttctccagcatttgtaagcgtatctgatcaggatgcaattaccatgttaaatgacggtacacttggcgcatatgtttccggtacatggaacaccggatcttttgaagcgaaatacggcgacggatatgcagcatgcaaattacctactttcgatgtaaatggaacagctacacagatgggatcttatgcaggatacaaattcgtaggcgttaactcccatactaaaaatgttggctggtcaatgctccttgctgagtatctcacaaatgaggagagtcagttagcaattggtaacgctacatcagagggaccggctaacacagtagcagcagctcagatcgattccccggcacttgcagcacttgcagcgcagtcagagtttgcagatcagcaggttgtaggcaataattactgggatccggcaaaggcacttggacagaacctggttgacggtgcaacagatcttcaggctgtacttgatgatgcagtagctggtattacacagccggtagctgaataatcaaaatatctgtaaaactcagatttccacatggctttggaataacttttatgaggagggcattatctcctgccagacaggacattgctttccggcagaggcagatattttcctgctggaaaccaatgctttccttgtgacaagctatgtggaaatttttaaaaagagaaaagtttttgcgattaagccaaaaattctcattcacgcgcatagggagtgaatctatgaaaacattttttaacgcaatcaaaaaatactttgccgattttggaacagccgtggcaaagggagatatctggtgcaagctttcgctgcttgttatgggtgcaggatactggggacggaaacagatcgtcaaaggtgtcttaataacagcccttgaagtggtagtgatcctgtttacaggaatgttctctatcaattatattaaggatttaaatacacttggtaccgttcagtatgagtccgtatttgatccgctgaccttgaaaaatactgttaatgattacgataactcattgctgatcctgctatatggtattattggtattctcgtaatcgtagcattcatatttttatatataagcaatatgaaagctgtttaccggcttcagcttatgaaagaagagggagaacatgtcaatacatttgcagaagatataaaatctcttttcaacggtaagttttatattacattacttaccctgccgagtatcggtgttattatgatgaacattataccgatcatttttatgtcctgtgtggcatttaccaattatgatatggatcatatgccgccaaactacctgtttacatgggttggacttagaaactttaagaatatgtttacaggcggcaccacaatcacattctcctatgcattcgtaagaattcttgcatggacaatgatctgggcagtatcggcaacatttacaactttcatcggtggtattcttttggcaaagctgatcaaccatgaagatacacattttaaaaaaatgtggagatcactttttgttgtgacaatcgcgattccacagttcgtaacattgcttcttgtaagcaaaatgttcagcgaccacggtattgtaaatacattatgttccaacatcggtctgacaggctggttacaaagtatcggacttgtttccggaaactatattccgtttctctctaaaccgggctggtctcatgcaatgatcattcttattaatatctgggtcggtgttccatatcagatgctttccgctaccggtattctgatgaatattccgacagatcagttggagagtgcacgtatcgatggtgcaaataaatggcagatcttctggaagatcacaatgccgtatgtattatttatctgtggaccatccctgattcagagcatcattgcaaacatcaataactttaacgttatttatctgctgacaagttccaatgcaacagcaaacatggcatttgcaaactctaatgcaaaagagacagaccttctcattacatggctgtttacattgaccaacgataactcaaactataagatggcatcggtaattggtattatttcatttgctatctgtgcgcttcttacattgcttagctatacaagaatgatcagtggtgataaagaggaggtgtaccaataatgaaaaggaaaacatggaaaatcattgtaagacatttagtacttgctcttttggcagtcatctggctgattccgattgtatggctggttgtaacatccctttccactacaaagggtgtaagttaccagcactttttcccggaacactggacactggcaaactatcatcaactgttcttcaagacagatacagcagcaaacttccctgcatggtttaaaaatacttttatcgtagcattttttacctgcatcgtttcatccgcttttgtactgatggtctcttatgcattcagttgtatgagattcaaggcgagaaaacctctgatgagcttttctatcattcttggaatgttcccaggtgtactttccatgatcgctgtttattttgttttaaaaatgatcggacttaccgattcacttgcaggtcttgttatcgtatattctgcaggttcgggacttgggtttttagtattgaaaggtttctttgatacgattccggtttcactgagagaggctgcccgcttagagggtgcttccgaggcaacaatttttggaaaaatcattattccgctgtcaaaaccgatgatagtatatacgatcatcaactctttcctgaatccatggatggattttgttctggcacggatcatgatcaagtccaaagagtccgcagactggacagtcgcgatcggtctttataacctgttacagaagacattaatcggagattacttctcaatcttctgtgcaggcggtgttatgatcgcaatcccgatttcaattctcttcgtagtgatgcagaagttctatgttgagggtgttaccggtggagctgtaaaaggttagaaaaatatttttagaggagaaagaaaaaaatggataaatttgtactgaatcttattcatcgtccggagatggtgccagagtattctgcaacagtgactggacagggaaaagaagaggatatcggagataaggcactgctgacagagtctttggatatctttaagacacagcagagattagctcatgagaatggattaaaagtaaccattcagatgacatatgcttcactgttcaatgatgaggcagtggagatcgcaaaacatgatcatgaagtatatggcgatgagatcgcattatctttattaggacttccttgtgaggagttccgtgaaaaatataagaccaaggatttctgtatctggatgttttccatggaagataagaaagccatcgtaaatgatgtattcgagaaattccatgacagattcggtttttatccggaatccacaggttcttattatatggatgctgacctgacaaactatatcaaggcagcatatccgactgtaaaatgtgcagttgctacctgctgggaggaaggcccgaaggcatatcacacctgcaacaactcctggtatacattatttgatggaggcccatgggcaccatggattccgtctaaacagaatacgcatgcaccggcagcaaataaagaagaggatagcggtatcgtagcaatcccacatctttcccgtgacctgattgcatgttacgatggaaatggttcgaacttcggaacacatccgcagaacgtactccgtggtatgatctatgacacaaagacatgggagtatccatatctttacaatctgatcgaccagtaccgttccttagagaaatataacaacggatattcctacaacatgatgttcgttggaccgggctggatgaacaagatgggacgctgggagcagccatatgaacttctttacaaatcctacagcgatggctgtgcttactacggcaaactgaaaaaagagggtcagttagtagatatgaccatgtcggagttcgctgattactaccgtgagaagaaaggtgtcaaccagaacaattacaacgagccggaatgtgctctctggagagatatcttatatggttccgacaaacagttattctggtactgcgatccatacatgagagcatgtgtcaacatggatcagggcggtgcgatcgttgaccttcgtccttatgcagcaaaattagagtggccggtcggcatcggaacaaaacatgttcaggatgcatcctatccgtttttaattcaggagaaataccgtgcaggttacttcacccactatgcaggagagggaaccgtaagaagtgcaaaactttcttacaaaggagaggaagtggatctctgcctctgcccgacacatgcacatttctcacaggaaggaaagacaagaatccttacattagacccggttacgatcgagttcagggatctgactgtaaaacttcagacaaaagagtactttgaggaaggttcttcgaacatcaggatcgagcgtcacattttagagatgagtgatccgactgcggaagtaacattaaatgaatacatggttgcatgttatggtacaactgagtattccgaagatatgagtcatatcacattaaagatcgacggaccggaagagaagacgatcaactatgaatacaagtgccgtgaggaaggcgttgtgggagctgcagaggtttccgcagttattcctgaaatcgagacaagagtatccatgacagcatccgatgcagatgcagaaggatatgtaaaagaaggatatgcattctcaccaatgttcacattgggatacagaaaaacaatctcagataaggaggtatttgcaacatggctcaacttggcaaaggcaaattaaattatagatgcccatcctgttttttaagagatctcgacatcgatatgttctacaataaagaaaccggtatttacagctgtatccgctgtcagtaccgcggaacggaagaggacgtattagagaaaaacgaaatgattcgtttccgctataaagcaatgcatgatagaattacaaaatttgattttgactaaattctggtaacagaaacaaaatgactgccgtactgaaatattgtacggcagttttaaaaagaggtaataaccatggggaaaaagaaaaaagacacgatggaactgagattttacgaagttccgcagggtgaatatgttctggcacttttaggagacaactggattcgtgattacggacatgatgaaagtaatcttcattttcacaatctcatggaaatcggatattgtaaaaacggtaccggcgagttgatcttaaatgaagagacaaaacgttatgaaccggcaatggtcagtattattccgcagaattacccgcatgtgacgatcagtgacattgcggagggaccaagctattgggaatatttattttttgatccgatggtcatgatccaggaattatatccggataatgctgtcatgcaaaaaaaagtattgcagatgatcaatcgtaaggctttatttttccatgagtgggaaaaccgcggaatttccgttcttgtgaagatgctcatggatgaaatgagacagaaaaaaaatcattttaatgattgtgtcagaggtcttttgatcgctttttttgctgaattgctccgcatgtgtgagagcgatgtctcggagaatgaagtaaagaaaaagacaggtgtttcccagatcacggcggcacttgattatgtaaggttagagtatgcaaacaatatccgtgtcgaggaacttgcaaaggcaagccatatgagtgagacacatttcagaagagtctttgaatcttatatgaatatgtcaccgatggattacatcaatctgatgcgggtgcagaaagcctgtgatatcatgaaaaagacaaatgacccgatggatgtggtcgcccagaaagtaggatttaccacgacatccacatttaaccggaacttcaaaaaatatctgaatacatctccgtatcagtggaagatcagtccggaaaattatgagagaaagctgctgaattataatatttccgcgttgaagggctggtaaataaatgggcgaaaatgcgtgttttgtgttgaaatacagatgcaaaatgcgcattttttcgttaaaatggagataagaaaaagataaggaggacatgacatgtcattcgaaataaaaaagatccatgatccgaagttttttaaggaaaactgcatggcaacacactccgatcatgtggcatatgcgaatgaaacagaagcagaagaaaaaaagagcagcttccggttattactggatggtatctggaaattccattatgcgagaaattatacgcagaccgtaaacggttttgaggcagaaacgtttgactgcaaatgctgggaggatatccgtgtaccggcgcatatccagatggagggctatgatatcccgcagtatgtaaacattcagtacccgtgggatggaagggaagatgtgtggcgcgacgcagtgccgagtgaatttaatccggtggcaagctatgtaaaatattttacactgccggaaggttttagaaaaaacgggctttatatttcttttcagggtgtggagagcggttttgcactgtggttaaacggtcattatgtcggatatagtgaggacagtttcaccccgtcagattttgatcttaccccgtatgtaaaagagggcgaaaataagctggcagtccaggtgtttaagtggacttcttcaagctggtgcgaggatcaggatttctaccggttctccggtattttccgttcggtttatctgtataccatgccaaaggtgcatgtgtatgatttaaaagtgcagccggttgtcgatgaggcggttttaaatgcagatcttcttgtcacaatgcagatgcgcggcgagggaaaagcaagactgaccctgaccggcagcagaaattattccgttatggaagaaaaagaagaacagattattttctctgaggagctgccagtctctgagggggaagttcattttgaaaaagaggtgaaaaaaccggatctgtggagtgcggagatcccgaatttatacacgcttacgatcgaatgttttgatcaaaacggggagagaagcgagcttgtcagccaaagaatcggattccgccgttttgaaatgaaagacggtatcatgacattaaatggaaagcgcattgtatttaagggtgtcaaccgtcatgagttcagttccaaaacaggacgtgcagtgacaagggaagaggttttaaaagacatcgttacgatgaaacagaacaacattaatgcgatccgcacctgccactacccggatgcttccattatatatgatctctgcgatgagtacggactctatatgatcgcggaaaacaatctcgaatcacacggttcatgggatgccgcgatgcatggttctgtgccgaaagatacgatcgttccgggggacaacatggactgggaaccgatgatgcttgaccgcgtcaattcctgttaccagagagataaaaaccatccggcagttctgatctggtcagtcggaaatgaatcttacggcggaaaagtaatttttgacatgtccgaaaaattccgtgccttagatccataccgtctggttcattatgagggaattttcaatgaccgcagatatgaggcgaccagcgatatggaaagccagatgtatacgagcgtggaaaatgtgaaaaaattcctcgctgagcataaggaaaaaccgtttattatgtgtgaatatacacatgcgatgggaaattcctgtggtgccatgcacaaatacacggatctgaccgatacggaaccgagatatcagggcggttttatctgggattacattgaccagtccatcttgaaaaaagaccgctatggaaaagattttcaggcatacggcggcgatttcttagagcgtccgacggattataatttcagtggaaatggaatctgctatggcggagaccgagatccgtccccgaagatgcaggaagtgaaattcaattaccagaatatcagtattctgtttgaaaaggaagggaagtttaccgttgtaaataaaaacctgtttgcaaataccgaccggttccgctgtgtggcagttttacagaaaaacggggttgttgtgaaaaaacaggagatagagacagcagtatcgccgcttagcacgaaggactatgagatcccgtttgccattttgcgtgcagatgataaggatcagaaaaaagacccggatgcagaatacacactcaccgtttcattccggttaaaggaggatatgagctgggcagatgcaggacatgaggtcgcttttggacagaagatctataaaaagatccctgctttccatgcatccgaaaagccgatccgcgtggttcacggcaaggtaaacatcggagtaaaaggcgaagattttgactgcctgttttccatgttgagcgggggacttgtttcctaccgctatgccggaaaagaaatgattgaaaagatcccgatgccgaatttctggcgggcaccggtggacaatgataacggaagcatggctccggcgcgctatgcacagtggaagatcgcgagcatgtatatcagtcacagaaacggtgggatgtttgacaatgtcccgaccaaagtggaagaaaaagacaataccgtgacagtcacttacacctattttatgccgacaacaccggcgggcaaatgtcaggtttcctacaccgttttcggtgatggaacgatcgagacaaaactgatgtatgatccggtagagggacttccggatatgccggagtttggaatgatgtttcagttcaatgctgattatgacaacctgacctggtacggcatgggatcggaggaaacttatgcagaccggagacacggcgcaaaacttggaatttacagcaacaaagtggctgacaatatggcaaaatatttagttccgcaggaatgtggcaacaaagtcggtgtgcgatatgcgcgcattgcggatgcaaaaggcaggggaatgatgtttgagggagatgaattaagcttctcggcacttccgtatacaccacatgaacttgaaaatgcagcccatgtttatgaactgccgcaggtacatcacacgattgtccgtgtggcattggcgcagatgggagtcggcggtgatgacagttggggatctttagtgcacccggaataccatattgatgtgacgaaaccgttagaatttacgttccggtttaagggaatatagaaaaggaagaaaatcctctgctcctgcataggcagtcgcatttttcttcgaaaaacaaggaggatttatatgaattttgtaaaaggaatggatttatccacgcttgcagagttggagaagtgtggtgcgaaatattatgacaacggagaggagaaggatctcttagagatcatgaaatcctatgatgtggatacgatccgcatccgtgtatggaatgatccgtggtcagaggccggagaatcttacggtgccggggaaaatgatccaaagacatcgcttgaaatcgcaaaacgtgtgacgaaagccggttttggagtacttttaaatctgcattacagtgatttctgggcagacccgggaaaacagttcaaaccaaaggcgtgggaaagctatggtgtcaaagagctagagcaggcagtctatgattttacgctggagatgatgcatctttatctggagaacggtgtcaacatcacaatggtgcaggttggaaatgaactttccaatggtctgctctggccggaaggcaaagtgccgaattatgacaatattgcagcgtttgtcaatgccggtatccgcgctgtccgaaaagcggatgaagaacgtcttgccggttccatcaaaggcgtatgcccgcagatggaaggtttgtcaaaaattccggtgatgatccatctcgacaacggcggcaacaatgcgctttaccgtgaatggtttgacaattttacaaaacgcggtgaggactttgaactgatcggtctgtcttattatccgttctggcatggttctcttcagatgttaaatgacaacatgaatgatattgccaagcgctacggcaaagatctgatcgtggcagaagtctccatgggatatacgatggacgactacaaggattatgagaaacttgccgatgaggagcgcaagggttatgcgacgaaaccggcgctggttgagaaaatcgaatacccgatgaccgtacagggacagtatgactttatggaagacttcttaaaccgcatcagccatatcgatgatggaaaagggaagggcttcttctactgggagccggcatggatcccggttccgggttccggctgggcaacgcctgcttccttaaaatacatacaggatccgggaccgtgcggcaacgagtgggcaaaccaggcattgtttgattatgagggcaatgcgctgccgacgttaaaactgatccgtgattttaaggcataaaaagcattgctgtctgaagataaaagagtgtatagaaaatcctgcaatatttatgtaaaaatgttgcaggattttttgcactttgttgcagtttgcgtttcagccattgcaaagggattcggatgcgttataataggattatcagagaaaacgaaacaaatgcatcctgcttttccgggaaaggaaaacagacgggatgacgtggaacaaaataagaacaaatgatgtattgtaaaaaggaggatttaagatggtttgggagaacgtactggcaaagtttaaagagttatttggcggcgaaggagagattggtgtttattttgcaccgggacgtgtgaacatgatcggagagcataccgattacaatggcggtcatgtatttccttgtgcactgacgatcggtacttatggtgtggcaagaaaaagaaatgataagaagctgcgtttttattccatgaactttgagcagcttggcgtgttagagtcatcggtagagaatttaaaaccggagaaagaagctgactggacaaattacccgaagggtgtaatgtgggcattcggagaaaaaggcatgaaagtagaacagggtatggatcttgtattattcggaaatatcccgaatggttccggactttcttcttccgcatccgtagaggttttaacaggatttatcttacgcgatatgtttggatttgatgtgacaaatcaggatcttgcactgatcggtcagtattcggaaaataaattcaacggtgtcaactgtggtatcatggatcagtttgctatcgcaatgggcaaagcaggccatgcgatcttccttgacactgcaactttaaaatatgagtatgcaccgatcaaactggagaatgcaaagattgtgatttcctgcagtaataaaaaacgtggactgggcgattccaaatacaatgagcgccgcagtgagtgtgaaaaagcactggcagagttacagaaagttgtctccatcgacgcacttggagatctgacagaggcacagtttgaagaacacaaagatgccatcaaagaggaagtgtgtgtaagacgtgcaaaacatgcagtttatgagaatcagagaacgatcaaagcagtagaggcactgaaaaataatgatgttgccttatttggaaaactgatgaatgaatcccacgtttctctccgcgatgattatgaagtaaccggtattgagctggatactttggttgaggaagcatggaagattgatggtgtgatcggctcaagaatgacaggtgcgggctttggcggatgtacggtcagcatcgtaaaagatgaggctgtggatacctttatcaaagaagtcggtgcagcttatgagaagaagatcggatatgcagcagatttctatgttgttgagattggtgacggtccagtgaaattagcctgatgaaaagaagtttttcatttctgaaaataagaggctcattgaaaataatatagagacttaaaaatatatgtctggcagagtattgcaaagacacgttaaacagtgtagaagtgaggaagaatatgatacaggaaaagattttagagttgacagaatatggtctggtgacaggacttgttgcaccggaagataaaagatttactatcaatcgtctgttagaactttttcaattagatgagttagaagatgaagtcgctgcagcatatgaaaagagagagccgatgacacaggagaccgctgaggatgccttagagggaattctcacagaaatgcttgactatgcggcagagcagggactgatgccggaggatacgatcacataccgtgatctgtttgacacaaagatcatgagcatgctgatgccaagaccaggtgaagtcatcacaaaattccgtggactttacaatcatcagtccgcacaggcggcaaccgattatttttacaaattaagctgtgattcgaactatatccgcagataccgtattaagaaggatctgaaatggactgcagataccgagtttggtaccttggatatcacgatcaatttatcaaaaccggaaaaagatccgaaagcaatcgctgcagcaaaacttgcaaaacagagcggttacccgaaatgcttactctgcaaggaaaatgagggatacgcaggacgtgtgaaccatccggcaagacagaatcacagaatcatcccggtaacgattaatggcagtgactggtttttccagtactctccgtatgtatattacaatgagcactgcattatattcaacggacagcacacaccgatgaaaattgagcgtgcaacgttcggcaaactgcttgatttcgtggaacagtttccacattattttgtaggatcaaacgcagatcttccaattgtcggcggttctattttaagccatgatcatttccagggtggtcattacgaatttgccatggcaaaagcaccggtcgaaaaagaaatctcgttcaagggatttgaggatgtaaaagcaggcattgtaaaatggccgatgtccgtgatccgtatcagcgcggagaaaaaagagcgtctgatcgagctggcagataaaattttacttgcatggagaggttatacggacgaggcagcatttatttttgctgagacagacggggaaccacataatacgatcactccgatcgcaagaagacgcggagatttatatgaacttgatctggtactgcgtaacaacattaccacagaagagcatccgcttggtgtttatcatccacatgcaaagctgcaccatatcaaaaaagaaaacattggtctgatcgaggttatgggtcttgcagtacttccggcacgtctgaaaaaagagatggcggacttagagcaggcactgcttgacggtacgtccatccgtgaggatgaagttcttgcaaaacatgcagactgggtagaagaattccttccgaaatacggatttacatttggcagcggtttagagggagaggtaaccccggaaaaactgcatgagatcgtgcagacagagatcggtctggtatttaaggaagtattaaaagacgccggtgtttataaatgtaccgaagaaggcagaactgcgttcatgcgtttcgtagacaaagtgaatgcataggaaatcattctgcaaataccagaatgcaaaatttgattaaattttcatctgtgttttttgtccggcaaatttttgtatgctgtgccaggacgaaagagataggcgatttatttgatcagaatgtatatggatttaaaaataaatatgtgataggcatgataggcagatgtcagcatcttcagtgaggatgctggcattttctatctaccgaaattgattttacactcaggcattgtttcgcgtttgtcagcggtaaaatttgtaccggattcttggaaaacagcatttacttctttatggtgctgtggtaaagtatttagagatcatgttacaggatgcgccctgttttagcgaggctggtgtggtctgtaacatccgaaatgtacacgaatggagatagaactatggtttcaaaaagaatacaaaaagcactgcttggaaattccgcgatccgtgcaatgtttgtggaaggaaaagcgatggcggaaaaatatggggcggagaatgtctatgatttttcactcggcaaccctgcaacaccggctccggcagcattaaacgacagtatcagagatttgttggatgaggcagataagaaaggagcggcaggttctttagaattgcacggatatatggaaaatgcaggttataaagatgtgcgtgaggcgatcgcggcaaacttaaataaacgttttggtaccgcatttgacgatcataatatcgtgatgacagtcggtgcagcgggaggcctcaatattatttttaaaacggtcttggatcctggtgatgaggtgatcgtgtttgccccgttttttggtgagtaccgtcagtatgcagccaattttgattcagagattgtaacggtaaatccggatcttaagacttttctgccggatctgaacgattttgaggcaaagattacggaaaagaccaaggcactgattgtcaatacgccgaacaatccgaccggtgtcatctataaaccggagacgatggaggcgatcgcttctatcttagaaaagaagcagaaagaatttggacatgacatttacctggtttcggatgagccgtatcgggaactggtttatgatggaaataaagaggattttctgacgaaatattataaaaatacgattgttggatattcgttcagtaaatcgctgtcacttcctggagagcgtatcggttacgtggtagttccgaacgaggcatccgatgctgaagatctgatccgcggtattgaaatttcaaaccgtacgcttggatttgtcaatgcaccatctctgatccagaaagcggttgcaagatgtttagatgagaaaacagatgtttctttctatgatgaaaaccgaacaatgttgtacgatggcttaacggaacttggatttacctgtatcaaaccggaaggagcattttacctgtgggtaaaatccccggtcgataatgaggaagaatttgtggaagagggcaaaaagctgcatcttctgatggtaaagggaagtgcatttggatgtggtggatttgtacgtcttgcttattgtgtttcccatgagacggtcaaaaattcactgcccgcttttgaaaaacttgcacaagtgtatggactgaaataacgcagtgtaaaaaaggaaaattgtagaaatcaacgtaagcatggaggagtagaatgagcagctgggagtcttatgtaagaaaagtagtgccttatgttccgggagaacagccacaggaacagcgtatgataaaattaaatacaaatgaaaatccatatccgccggcaccgggagtgatccgtgcactgaaagaatttgatacagaccggcttcggttatatccggaaccgacctgcaaggttttggtggatgcaatcgcagagtattatggattaaagagcagtcaggtgtttgtcggtgtgggatcggatgatgtgcttgccatgatcttcatgactttttttaattccaaaacaccggtctggttcccggatatcacatattccttttatgatgtctgggcagacatgctgcggattccatatgaggtaaagccgttagatgaaaattttcagattgtaaaagaagattattatggcgaaaatggcggtgtggtttttccaaatccaaatgcaccgacgggaattttaatgccgttgtctgaaatagaggatatcatacaacataaccggaatgtcatcgtggtggtggatgaggcatatatcgattttggcggggagagtgcacttccgttaatcgagaaatatgataatctgctggtagtccagacattttcaaaatcgcgctccatggcaggcatgcgtatcggttatgcgatgggaaatgagaaactgatcaaatatatcaatgatgtgaaatattcattcaattcctataccatgaatcagacagcgcttgcacttggtgtggaagcaatcaaagataaagcctactttgaagagacaagacagcgtgtaatagcaacccgtgaatggacgaagcaggaactcacaaaacttggtttttcatttggcgattccatgagtaattttatcttcgcgacacatgagcgtgtatcggcaaaagaactgtttgaggctttgaaaaaagaacacatttttgtgcggtatttttcgaaggaacgaatcagcaattatctcaggatcagtattggaacgaaggaagagatggaggagctgatccgtttcctgaaaaattatctgcagtgataaaaagtgaactggtcatagttacaaaaactggaaacataaccagaagccactaattggatggataaaaagtatcgtatccggtattttcaaggtacagtggagccgcctgcttttgagccagccggtttgtgccgaaacgaaagagaatgagaccgctaaaagtacagatcactccggtggcaaaataaagaacgaaaaagagtgtgctgttgccggtcggtaaaatgccgcttataatggttccccagaagttaaatatcatatgaaacaggatagactgataaatactgccgcctttttcacagatgtaacctaagaccatgccgaggaaaaaggcatagattccctggatcatattcatatgaaaaagtccaaataaaagcgcctgcatgatattggctgcccagaatgggaacactctttttgcctgatgcatcgtgacaccgcgaaagagaagctcttcgccgatcggggcaagcaggatggaataaaaaaacatggaaacggtcagtccactgtttattccggtactttccattaatttttcatatgccttcatccactgcggaaacagcgaggctgtgaaagagaccagataggtcgaaaggcactgagtaccgggaactaaaaggatgatcccaacaatggaaagcggatgaaaaacttttcgtggatgaatcagatagattccattatacccggcatgataccagaagccaaatgctccgatacagagaagggaaaatacaatcatgatcagggtatttacatgtgtcgtggaccataaatctaatgttttgttccaaagatctgcgtagatacggttggaagaaaaaatatagcggatatgttcgtaaaacagagtgactcccataacaaaaaacatggcaaggtactgaaatacaagtgcaagtaaaaacggtataaatgtaaagaaaaaagaaccgatttttttcatgtgaatactcctttgcaaggtgaaataactgttagtgatgaaaatattatagcaaacatatgtttgaaaatcaatagaaaagagataaaaacagaacgtatgttcttgaaatgataatctatatatttcattgcatatatggggagaaaatgatataatggcggtctgcgaaaaaaataaaattacataaaatatgtatttactttaaaactttaatatgctaaaatgtatcgtaggtgtatagcgcatatagcgtgtaattaataaaaaaggagaaaggaatatgagcaagaaacttaggacagaggcagtcgatcatctttttgatgctatcttaagcctccagaacaaggaagaatgttatacattttttgaagatgtatgtactgtaaatgagctgctttctttatcacagagatttgaagttgcaaagatgcttagagatcagaaaacgtatctcgatattgcggaaaagaccggtgcttccactgcaacgatcagtcgtgtgaaccgttcattaaattatggaaatgacggatacgacatggttttttcaagacttcaggacatggataaagaatagaaataaaaagaaccgctatttttaatttgcgacaacaggacattctgcaaagtgtgcagcctgttgttccattgaaaatagcggtttttctgttaaatacggtaaaacataacaagtaatctgagcgggaagcatgcagcctgttattttttggatggctttgtctcaggattttttgaagccatctgatcgatcatcttttcaatcagagtttttttgatgtaaacgtcatagctgagcatacagataaagctgaatgtatgcaaaagatctgcttcatcttctgacgcatccgggaatgtgttcatggaagtgttgaatttttttgcgagatctttcatcaggttctgtgtttccggatgttctaaactgaaaacttctttgtagatatcttcgagactgtaattctcgtcattgccgaaatatttttcagtgatcgggtttaaaataccctgaatgtcgctgatgcttaaaatacttttcagataataaataaagatcaggaccagtacatgctctttggtatacttctttttctccggtggaggaagaagattgttttttgcataattgttgatcattgttttggtcaggatcttgtcatcatcatgacgttttgaagcggcaagctgtgaatccatgaatgtggttacctgatccatatataaatcaatattcggaacatcttccggtttgacataatcaatctgctgcagggaatctaagattgaacgtaaaaattgttttgtatccatatttgtgtcacctctgatcacattatatagtattgaaaactagatgacaagatataaatgaagaaaaaataattcaatatgggttttattacatgaaatatttatgttatagtataagaacaagcaatgaaagaaaaggaaaatataaccatgagtatatatgatacgttgaatgaacagcagagagaagcggtatatcagacagaaggtccggtactgatcttagccggggctggctccggtaaaacacgtgtgctgacacaccgcactgcttatttaatcgaagaaaagggtgtcaatccttaccatatcatggcgatcacttttaccaacaaagcggcgggagagatgcgggagcgaattgataaaattgtcggatttggctcggagagcatctgggtatcgaccttccattcaagttgtgtgagaattttgcgccgtcatatcgaccggatcggatttgacaccaattttacgatttatgatgcggatgattcaaaatcactgatgaaggatatatgcaagcgtttagagattgataccaagatttataaagaaaaaagttttttggcagcgatttcatcggcaaaagatgaactgatcacaccgacagagctgatgcagcgtgcactgacatcttccgattatgcaaagcgtaaacaggcggaggtataccgggaatatcaggaggcgttacataagaataatgcgctggattttgatgatctgatcatgaagacggtggaacttttgcagtctgatacggaggtaaaaaattattatcaggaacgttttcattatattatggtggacgagtatcaggatacgaatacggcacagtttgagctgatccgtcttttggcaggcaaatatcagaatctttgtgtggtgggtgatgatgatcagtctatttataagttccgtggagcaaatatttataatatattaaattttgaaaaacattttccggatgcaaagacgatcaagttagagcagaattaccggtctacgcagaatattttaaatgctgcaaacagtgtgatcgcaaacaatgtcggcagaaagtcaaagacactctggactgcaaatgatgagggaaagaagattgactttgaacagtttaataccggctatgaggaagcagattatattgcgcgtgatattgcaggcggggtaagaaacggagattaccattatggggattatgctgttttgtaccggacgaatgcgcagtcgcgtctgtttgaggagcgttttattgtatcaaacattccatataagatcgttggcggtgtaaatttctatgcgagaaaagaagtgaaagatctgctcgcttatttaaagacgatcgacaatgcgcgcgatgatttggcggtgcgccgtattttaaatgttccgaaacgcggtatcggcgcaacaaccgtaaaccgtgtgtctgattatgcggagtcatacgatatcagtttttacgatgccttaaagcgtgcggacgagattccttcgattggaaaagcagcgtcaaaggtaaaaccgtttgtaaatctgatccaggtattccgcagtaagctggaatttatcagcatttccgatcttctccgggaagtgattgaggaaaccggatatgtcaaagagcttgaagcggaaggtacggatgaggcagaagcgaggatcgagaatatcgacgagctcttaagtaaagttgtgagttacgaggaaagcgaagaacatccgacactgagtggctttttagaagaagtagcactggtggcagacattgacagtctggaagatgacagcgattatgttgtattaatgactctgcacagcgcaaaaggacttgaattcccgaaagtgtatttagcaggtatggaggatggtctgtttccaagttatatgtcgatcacatcggatgattcgagtgagcagttagaggaagaacgccgtcttgcctatgtgggtatcacccgtgccatgaaagagctgacgatcacctgtgcaaagcagagaatgatccgtggggagacacagtacaataaagtttcccgttttgtcaaagagataccgctggagcttttagaaggaaaagcctccgttgtttcgcgaaaagaatcagattcttcgattgaaaatacatggaatgtgaaaccaaagcgcatgacgatgagacagcagccttccggacagagcatgcaggcgcgtgcatttgcctctgttcatacgaaagaagaaaagctgccgtatgatattgcagaccgtgttttacatacgcggtttggagaaggaacggtggttgccattgttgaaggtgggagagattatgaggttacagtccagtttgacacggtgggaattaaaaaaatgtttgcttcttttgcaaaattaaaaaagttataaaatcgtttaatttataaattttttataggcgaaatgggaaacatatgatataataaacatatgcaataagcagtgcggaattatttgttttctgaacaagtactgcaatatgggaataatatgtatcatatgactgtaagatgtcacagtctgaaaatagaaggaggggagccccatgaacaagatggatgatttaaaagatttagttaacatttcaaaattaaatgaactgctgaacaaaaaagaagcagaggaagagaagaaagcttccaaagttgtctgggtattcgcaattatcggaatcattgccgcagttgcagcagcagtttacggaatctatcgtttctttgcaccggactatttagaggatttcgaagacgacttcgaggatgattttgatgatgatttcttcgaggacgaagaagatgacgacaaagcagaagagccggcagaggacaaaacagaagagtaagaaatatctttaaggggctgcagtgttgcagccctttttaaattcataggaaaagagaaaggaactggttatgaaaaaagggcagatcgtagaaggaatcattgaacgggtggatttcccgaataaaggaattttaagagcggaagatggcacgcgtgtcattgtaaaaaatgcgatcatgggacagaaagtatcagcggcggtcaataaggtcagaaaaggaaaaggtgagggacgcctgctcgaggtgttggaaaaatctgcactggaactgccggaaccgggatgtgttcattatggtatctgcggcggctgtacattccagagccttccgtatgaagaacagctttccatgaaggagcagcaggtaaaagatctgatcgatgcggtcatcaccgaggaaaataagggatatgagtttttaccgatcaaggcgagcccaagaccaaaggcataccgcaataagatggagttttcatttggagatgaatataaggacgggccgttagcacttggcatgcataaacggggcagtttttatgatatcgtaaacgtaggggagtgtcagatcgtagatgaagatttccgccgtgtgcttaagatcacattggaatattttaaggaaagacaggtcccattttaccataaactccgccacaccggatatctgcgccattttcttgtgagaaaggcggcaaaaacaggagagattttagttgacctggtaacaacaacgcagacggacggacttggtgcggaaaccgaaagcatattattagacggatgggtaaaggcactctgtgaggaaacatatgacggtgtgttaaaaggaatcctccacacgaaaaatgacagtgttgccgatacgatcaaaaatgaggggacagatattttatttggacaggacttcttctatgaggagctgctcgaactgaaattcaagatcacgccgttttcctttttccagaccaattcccttggcgcagaagtgctttatcagacggcgcgagaatttatcggagatgcgctcgatgatgaggcgagccagacggtatttgacctgtattccggaaccggaacgatcgcacagatcttatctccggttgcaaagaaagtgatcggtgtggaaatcgtggaggaagcagttgtggccgcaagggaaaatgctgccttaaacggacttaccaactgtgaatttatcgcgggagatgtattaaaagtcattgacacgattgaggaaaaaccggattatatcgtacttgatccgccaagagacgggatccatccgaaagcacttgagaagatcatccgctataatgtgccgcagatggtttatatttcctgtaaaccgaccagtttagcgagagatcttgaggtgctgcaggcgagaggatataaggtgaagaaagtgcagtgcgtggatatgtttccttcgacaggaaatgtggagactgtatgtttattgtccaaactccacgaagcgaagcatcatgtgaatgtgagactggacatggacgagatggatttaacggcggctgagaggcgctaaaggtccaggggacctttgcccagcgcggaccgaagcggagcgtagacaggctacttatgaggagataaagaagtatgttgcagagtataatgatgggatgaaggtatctaatctgtatattgcacaggtgaagagaaagtgtggaattgaattagcg

SEQ ID NO: 5143 - DNA, 99215 bp, Unknown
  gut microbiota DNA sequence
accagcagccaaccgtcagtacaaagacaccgtattccgcatgttgttttcagagaaagagaaccttttatctttgtacaatgcagtaaccgggaaagcttatcagaacgcagatgatctgaaaatcgtcacgctggaaaatgcaatctacatggggatgaaaaacgacctggcatttatgttagagacgaatatttatctctacgagcaccagtccacgttaaatcccaacataccgctgcgggatctgatttacataggaatcgaatatcagcagtatgttgatgataagtccttgtattcgtcccgcctgcagaagataccggcaccgaaatttatggtattttataatggaacggatgcagtggatgaccgggtggaacttcgactgtcaaacgcttatgagcatctggctggcgagccggacctggagttaaaagccctgatgttaaacgtcaatgaaggacataacaaagagctgatggagcagtgtcagacattgaaggaatatgccatttatgtagcgagagtccgcaaatatacatcagaaatgaacttaaacgatgcagttgcacgggcaatcgatgaatgtatcaaagaaggaatcctggtggaatttcttcggaagaatcgttcggaggtaaagatggtgagtattttggaatatgataaagagtgggaagagaagaaactccgaaaggcagagtatgaggctggcaaaagtgacggaatcgagatcgcagaagagagaatgatccataatatgattaagctggatttcccaatagaaaaaattgcagaagtaactggaaaatcgccattggaaatagaacaatatttacaatcgaacagacaataaatattttaaaaagattacggaaactgttgataaaactatataaaaaaataatgaaatgaacagtaaataataaaatcctctgtaaacagaaaaacaggtggcaaatagcacctgactgtttgcagaggattttattattactatttaccaataaaaatttatcgtaaaacaataaaaatatattgcaaaagcaagatatatgtgtataataaaggaaaacaataaaaccagaaagaaaaatctggaatcaaaaacaaactcaaagaaaagtgaatcagatcaggaggagaatcatttatgcagcaaaaagaaatttcacggtggctaaaagcaatcacgattgtactggcgctgatgggggcggtgttctttctatatattatgccggtacttgcaatgtcatggagggacgcggatgaatcactggcgtatctttttatgccggggctgttgtacggctggtgcattgcggtgatctgttatgcgatcctgtaccagttctggaaagtatgtgtgcagatcggaaaagacaattcattctcaaaagaaaatgcaaaatgttttcgaaatatcagtcacttcgcattgctgctcgcagttgtgtggtttgcgggaattgtttttctggcaatcttagcggtcaggcagcccggaatcagtatttttatgatcaccgcagttttgctttcggtcatgatatctgttttggcagcggcattatcacatctgatactgaaggcctacgaattaaaacaggaaaatgaacttacgatataaggagagacaaatggcgattatcataaatatagatgtaatgcttgcaaagcggaaaatgagtgtaactgaactctcggaaaaagtaggtattacaatggcaaatatttccatactaaaaaatggaaaggcaaaagcaatcaaagtagacacattaaacaagatctgccgggcgttggactgccagccgggagatattttagaatatgttccatcggatgatgaaatttaatatattgcacggaatgaagcaggaatatgacagtttatgaaaaactgaagcaggaacaggacagcttattggaaaaggaagggagcatgaaaatggatcagaatcttacagtcagttacgaggagcagaaagcgcagtggcaggaaagaaaaaaacagcagcagaaagaaaatgcggggatttttaaaaaacttgcgccgacaagcctcatttacgcactgatctatacagtctgtatttacaaaaatatgacaggtgccgcagtacttctgtgggtggtggcaacgatcggatatatctgttacatcgttaaaacggtaaaggaaagaaaagtttttaaaacaacaataatttttgctgtgtatatgctgatccttgcggtcagtacatttacaaccggaaatgagtggatcatctggatgaattattgctggatatttgcattcacggtgtgtttcctgatacgaaatatggcagatgaaaacgaatggaatttctgggattacctgtgcggtggagtaaatgctgtatttggagcaattggcagcattgcaagaccatttggcgatggaaacgattttgcacgtttgcgggagaaaaaagaaaatggcaaagcgcgtgagatcctgatcggaattgcagtagcgataccggtggttcttctgatcggtggattgttaatgtcggcggatctggtattttcaaatatgattgcaaaagttttcgaaggaatcaggataccggcaaacctggcagggatttgtttcatgttatgttttggttttatttcatcttactgtggagtcagatatacagcatacagaaaagaccggcaggacagggaagtaaaaattcttacagagacgacagcaatgtttacggtttcggtcttagtggcggtattatatgtgatattctgtggtatacagatcatatatctgtttggcggtggcggggagctgccggcaggagtgacctatgccgaatatgcaaggcagggatttttccagctccttgtggtgtgtattttaaatctgggggcggttcttacaatggagcatttctttcagaggaacagggcggtcgatgccgttctgacggtgatctctgtatgtacgatcattatgacagcatcgagcgggtggagaatgatcctgtatatccgggcataccagctcacatttttgcgtgttgtggtacttgtggcactggcagtgatcacgcttctgatggcagggacgatctgttatatctggaaccgcaggttcccgttgtttcagtatggaatggcggttgtgtgcgtcagttatgtcctgtttgcctttgcacatgtagatgcggggattgccgcctatgatctggcgcagatcgaaaatggaaatactgcgggcgattacagttatctctcctgtttatcaacggatgcggcaccagtgatcgctgagtacttaaaagaacatccggacaagagttattacggggatggaatatataactggaagtgggaatatatgcaggaaaatgacaggatgaaccagcctgtgacgctccggacatttaatctgtcttatctgcgtgcaaaaagaatattttcagaaaaataggtcataagtatcgatttattgtcataaaaataatatttatttacaaatgatctccggttttgtataatgaaacaaagatgttgtgaaaatttatgatgaggagaacaaaagatgaaaggaaaacagctggaaagataattgcactgtttgccgtggcgggaatgctcgccgggtgtggtggaaaaacaggtactacgccggatgattatgcgacaaacgatggctatattacaacggaaaccgccgggaacagtacaggcggtgcacagtcggataccacatcgggcacggcagggatttcgaaagaaaatataaaagtcggcgtgctttatatttcagatccggatgagggaagcggatattcttacacgcatgatctgggaattgtgggaatgcaggaaaatctgggtttaagcgatgatcagattgagagaaagatcgtggatgactctgacgcaaaggcgacggaggaagcaatcgaagcatgtatttcggatgggtgcaatattatttttacaaccagctgggggtatatggaaacaacagcagagatggctgagaaatatccggatatttacttttcccatggaaccggttatatgtcaaatggaaagaacttcaacaattattttggtcgtatttaccaggtaaggtatttaagcggtatcgtggctggcatgaatacaaagtcggataaggtcggctatgttgcagcgcaggattcttccaattcggaggtgacaggtggaattgatgcatttgcgatcggcgttgcagctgttaacccggaggcaaagatctatgtggcagtcacaaacagctgggatgatccggataaggaaaaagcagcatcggaacagctgttggatatgggctgtgatgtgatggcacagcattgtgatacgccgtatccgcagacactcgcacaggaacgtggtgtatatggtatcggctataactcagatatgagcaaggaaacaccggatgcctgtctgacgagtgttatctggaactggagtgcatactatacttcggcagttaagagtattatcaatggaacctgggatggatcaaactattatggaggtatggcagaggggctggtacagctgacgaatctggcatcttttgcggcagagggtacgcaggagaaggtggatgaagcgactgcagaaattttaagtggcagcaataatgtttttgacggagtgatggagacaaatacaggggagacggttggaacagagaatggaaccttagatgatgcaacgattaccggcggcattgactggtattataaaaacgttgtgattgtggactagggggagaatgagatgatgaaattgacgattcgaaaaaaagttttattctgttctttgataccgctgcttctgttaagaggaattatccttctgatcgcgtccacgatcgtaaagggtgcaattatcgatcaggtggaaaattcattaaaaggaactgcaatcgcgacgcaggcagcttatgaccagaatgcaggtacctatttgcagacggaaaatggtgatatctggaaaggaagttataacatttcacagtcagagaatctggtggataccatcaaacaggagtctgggatggaggtgacatttttctatggatcacagagaatcatgacttctgcagtcgacaaaaatggtgacaggattctgggaagtccggcgggtgacaaggttgttgaaaaggtattaaatggtggtgagggatatttcagtgataatgtatccatggatggcatcatatattatggctattatgttccggtataccagaaaggtgataatacaactccgattggaatggtgtttgccggagcagaaaagcaggaaatctcgcatagtgtgatacagatcattaatacgatcgtagccatcgtgctagtggtacttgtgatatgtattattattgtagagatcagtgcaacttcgatcacgcgcgcattaaagaaaggaattgcaaatgtgcaggaagtgtctgcaggacatctcgatgtagagtttgacaggaaaatcttagagcggaaagatgaagtcggggatctgaccaaagcgatacagcatttacagaaagaactgcaaaagatcattaagggaatcaaggaaagtaccgatatgctgatggaagcatccaatactttagaggatacatcccatcagacttacgatggaatgcgtgaggtggaggcaacggtagattctattacaaccggggcaaatttacaggcagaggatgcaaaaaaagcttctgacaatgtaaaatatatgggaaatctgatcattgagaccggcagggcagcagatgaactgaatgaaagtgcagatcagatgaaacagtccagtgatgcggctgttgttacgatcgatgaactaaaacgaatcagcgaagaagtaaaggcagctgttgcaacgatcgcggaacagacgaaacagacaaatatttcagcacagagtattcagaaggcatcgcagtttatttctgaaattgcatcccagacgaatcttctttctttaaatgccagcattgaagccgcacgtgcaggtgaggcgggaaagggttttgcggttgtggcatctgagatacagaagcttgcagaacagtctgatacggcgagtggcaatatcggcgaaatcgtaaatacactgatcggaaactcccagcgtgtggttgagacaatgggcaagacacaggagatcattgaaaaacagaatatgcatatcgagagtacggagcagatggtaaatggtgttatgggtgagatcgacgcatctattgaacgaattcgccagattgaaacacgtacaaagaaattagagagtgcaagaacagagatcatagatgtcattgattctttgtcagagattgcacagcagaatgtggaaggaaccacgcagacaagttcatccatcacagagattacggacagttttcagaatatcaaggattctaccgaaaatctgcgtaatatggcggatatgcttgcacacaatatcagacattttgatatatgataaaaatatggccttaagctgcagaatatggagacaaaacagatggaagtgcttgctgtttttgacgagaagaattatgacgacacaacaaaagtatatgaaaaatataatgtgcgtggtgtaattttccgggatggaaagattgccatgcagtgcagtacggatggcgaatataagatgcccggcggcgggatggaaaagggagagagttttttagaaacccttgtgcgtgagatccgtgaagagacagggcttaccgttttaaaagagtctgtgtgtgaactaggggagatccttgagatgcgccgcgatatatttgatccgtcctgtaaatatatctgtcattcttacttttattactgtaaggtaggggaaaaacaggagaaacttcatctgacacccagtgaagtggcaaaggggtattatcttaagtgggagcagccggagactgtatacaataccaatatacgcatagaaaaggatccgtggatcattcgtgacactgcatttgtgaagatgattctggatggaaaagtaaaattgccggaataaaaaggcaaagaagaaatccggtacataaaataatagaatgtccgcggagcgcgcattctattatttttttgtggaagaacgacaaaaaatatgttatacttaacaatatgtattgcagaaaaactgatctgatatgcaatagataaaggcacagataaatgacggaggatggcgcatatgaatgaaaattatgtaacacttaccattggaaaacagaaaaatattgcactgatcgcgcatgataataaaaaagcagagctgatcgcatggtgcgaaacaaataaagagatcctgaaaaatcatttcctttgtggaacagggaccacggcacgtatgattacagaccagaccggacttccggttcgtggatataacagcggccctcttggtggagaccagcagatcggtgcaaagatcgttgagggaaaagtagactttgtcattttcttttctgatccattgactgcacagcctcatgatcctgatgtaaaggcactgcttcgtattgcacaggtatatgatatcccgatcgcaaacaataaggcatcggcagactttatgatcagatctgaatatatgaatgaagagtatgagcatgaggtgatcaacttcaaagaaaacatcaaaaaacgctcagagacattataagggggaacatttttcatgagcaaagtagcaatcgtatcagacagcaacagcggaatcacgcagagtatggcaaaggaatttggagttaccgtgatgccgatgcctttttttgtgggagacaagacactgtatgaagatatcgatctgtcacaggaagagttttaccagatgctttccgagaagacagacatccatacatccatgccgcttgtaggaaatgtgacagatacctgggatgaattgttaaaagagtacgatgagatcgtacatatcccaatgtcgtccggacttagtggttcctgtgagacagccatgatgctttcccaggattatgatggaaaggtgcaggtggtgaacaatcagagaatttctgttacacagcgccagtctgttttagatgcacttgcgcttgcaaaacagggaagaactgcatctgagatcaagacaattttagagcgtgataaatttgaatcatcgatttacattatggtggacacgctgtattatctgaaaaaaggcggcaggatcacaccagctgctgccgcgcttggaacactgttaaaattaaaaccggtgcttcagattcagggtgaaaaattagatgcatttgccaaggcaagaacggtaaaacaggcaaagagtatcatgattgaggcaatgaagaatgattttgccaaccggtttaacgatccgaacggagagcatatgtatcttgagatggcatatacgcatgatttagaagcggcagaaaacttcaagaaagaagtgcaggaggcatttccggggatggagatccgtatggatccgctttcacttagcatttcctgccatatcggaccgggagcgttagcagtggcatgttcaagaaagattccagagctggaagcgtaatagaaaaataaaagagaacagagagaaaagccagataaagcaatcgcctgaaatctgaattacaagagataattcggatctcaggcgatttttacctatagaaattaaaagtcctttgcagacagaaaaatttcacgctgtttaggctggagaactgctgtgctgccgtatctttttgcttttccaaatgatataagtgatcatcagaggaatgccggcgcccacccaggcagcaggatcagcaaggcagatcccctgataaccgagtggtttctgcaggagtgcgatcgcaacaaagcggcataccagctcgatcacgccactcaacattggaacaagtccttcgcctaatccctgtaaggcattgcggtataaaaagatcatggcaagcgggaggaaaaaccagcttactgtttttaaatacatcatggcataggagaaaatctcatcggaaggattgcttacaaaccagcttacgataaattctccaccgaaaatacagatggcagcaccgatggctgcagcagcgatacagatgaaaaatcctttgcgcataccgtcgaaaatacggtcgtattttcctgcaccgagattctgaccacagtaggttgccatggcggtgccgagcgtcggcatggtctgagttgcgatattgttgactttagaagcggctgtaaaggaagcaaccacactggaaccaaacacgttgacagcactctgtaagatcatggttccaatggcggtgatggagtaatttaatgccattgtgataccgatcgagagcatgttaatgacacccgggcgatccagataatagtccgcttttgttgtgcgaaggatctcaaactgccggaacatatggataaaacataaaattgcggagattccctgcgcaatgatggtggcataggcggcaccggcggttcctgctttcagcacgataataaataaaagatccagtaccacatttaatatagaagaaaagatcaaaaagtagagcggtgttttgctgtctccaatacctcttaagataccggcagatacattgtagagcattgttaagatgatacctgcaaaaatgaccttgatgtaagcatctgccatggataagatattatccggtgtatgcatccagactaaaaacaggcgggaagcggcaacggtcggaatcgtaagaattgcagatacgatcacggttaagatcagggagagtgcaacgtagtgttttaacaagcgaaaatcttttgcaccgaaggcatgcgaaatcatgacaccgaatccctgtgcgattccggtggcaaagccgagcactaaaaacatgatacatccggtggaaccgacggcagcaagtgcatcttcgccgaggtatcttcccacgatgatcgtgtctaccatattataaaattgctggaacagatttcctaataaaaccggaatggaaaaaagcagtatgatttttaatgaactgccggtggtcatatcttttgtcatgctactggaaactcctttcaaactttggtatgatgtaattattcagtgcacatatatgcagtataatgtaataaacatgtaaggcttagtatacgtcacaaaaatcagaaatacaagcggaaaataagacttttttcctgatttttttaagggagaatcagatggacattaatttggaatactataagatattttattatacggcaaagcagaaaagtgttacgttagcggcagaaaaactgtcaatctcacagccggcagtcagccaggcgatcaagcatttagagaaggatcttggctgtgcattgtttgtaagaatggcaaagggagtacgtctgaccaaggagggtgagatgctgttttcctatgtggaacgcggctatgaggcgattctttccggagaaaaaagacttcttgagatgctaaaccttgaaaagggagaaatctgcatcggtgcaagtgatatgacattaaaatattatctgcttccatatttagagcggtttcatgaaaaatatcccaatatccgcgtgaccgtgaccaatgcgccaacaccggaaactttacagcatcttgcggatggcaggatcgattttggaatcgtgagctctccggtggagccgcagggatggcttaagatcatcccggtcaaagagatccgcgacgtttttgtggcagggaaaaaatacaaagagctctgtgggagaaagatgcaatacaaagaactttcggaatatccgctgatgtgtttagagggaagcacctcgacgagacattatgttgaggcatttttagaagaagaaggtgtgacggtgtccccggaatttgaacttgccaccagtgatatgctgattcagtttgcgctccgcaatcttgggatcgcaagtgtgatggaagagtttgcaaaagagtatgaggaggatggcaggctttttaagctgcagtttgaaaaagaaattccggcacgaaaattctgtatcgtattaaatgagaggatcccgatgtctgcggctgcggcaaagcttttaaaaggacttttataaattcacataatgaatgattatatcagatataaagaatattaattttacttatagagaaacatcatgtataatcagtaagtaaacaggaatagcatagagaaactaggaggatattcaaatggtaaaagcagtcgttggagccaactggggcgatgaaggaaaaggaaagatcacagatatgcttgcgaaggaagcagatattatcgtacgtttccagggtggtgcaaatgcaggtcatacgatcgtaaatgattacggaaagtttgcacttcacacattaccgtcaggtgtattttacggacacaccacaagcgtgatcggcaatggtgtcgctttaaatattccggtacttatgaaagagatccagtctatcgtggagcgaggcgttccgaagccaaagattttagtttcagaccgtgcacagatggttatgccttaccacattctgtttgaccagtatgaggaggagcgtttaggcggaaaatctttcggttccacaaagtcaggtatcgcaccattttactctgataaatacgcaaagatcggtttccaggtcagcgagttatttgacgaggagctgttaaaagaaaaagttgtccgtattgcagagacaaagaatgtactcttagagcatttatatcataaaccactgatcaacccggatgaattattagagacattacatgagtaccgcgataccatcgcaccttatgtatgtgatgtttcttcttatctggatcaggcaatcaaagaaggaaagactattttattagagggacagcttggaactttaaaagatccggatcacggaatctatccgatggttacatcttcctctacactggcagcgtatggtgcaatcggtgcaggtatcccgccatatgagatcaaacagatcgtgactgtatgtaaagcatactcttccgcagtcggagcaggtgcatttgtcagcgagatcttcggtgatgaggcagatgaactcagaagacgcggtggtgacggcggtgagttcggtgcaaccacaggacgcccgagacgtatgggatggttcgactgtgtagcaagtaaatatggctgccgtctgcagggaaccacagatgttgcatttaccgtactcgatgtacttggctacttagatgagatcccggtatgtgttggatatgagatcgacggtgaagtgacaacagatttcccgaccacagcaaaattagagaaagcaaaaccggtattaaagaaccttccgggatggaaatgtgatatccgtggaatcaagaaatatgaggatcttccggaaaactgcagaaaatatgtagagttcatcgaggaacagatcggctacccgatcacaatggtttcaaacggaccgggaagagacgatatcatttaccgtaccaaataggaaaaaggactatccgatatgataaaaaatattatttttgacgtaggaatggtgttagtcaactgggatccgcatgcggcgtttcaggagttaggttttgatgaaaagacagaggaggcggttggaaatgcgaccgtttactctgatgcctggaatgaatcagaccgcagtgttctggatgcagaggagcagcttgctgtatttgtccaaaatgcgccggaatatgaaaaagagatccgcctgttctgggaaaatgttgcacgggcaatttgtcagtacgattattcgcgcgcatggatccgggaactgaaacagaaaggttaccatgtgtatatcctttccaattacggaaaatggacttatgaacatacagcggaagctctttcatttctttcggatgtggacggacaggtattttcctttgaagttcatcagatcaagccggaaccggagatctatcggacactgttagacaaatttaaccttgtggcagatgaatgtgtatttttagatgaccgcagggaaaatatcgaagcagcggaaacacagggtattcataccgtgttgtttacgacgtatcaggatgctttggaaaaattaaaaacatatggtgttatgtaggaaatggtacatgactgcataaaatcgtatcacaggaagagatacaggataagagcagctttcacggatgtggaggctgcttttatttatgataatagaatgctcgcagagtgtgcattctattattcatgacaatagaatgctcgcagggtgtgcattctattgtatatgttcacacttttatcacagattcatcctcctttaaacacaattacacgttactcttataaagtaataatttggttactggtcacacgataagtgcggatagtggcatatattgagaatgaaataaggaggagagaaacgtgattgagatcaatcatctggtaaaaaaatatggcagtcatgttgctgttgatgatctgtcgctcacggtagagccgggtaaaatctatggttttctgggcccgaacggagccggaaaatcaacaacgatgaacattattactggctaccttgcagcgacatctggtgaggtaaagatcaacggatttgatgtgttaaaacagccggaggaagcaaaaaagtgtgtggggtatctgccggaactgccgcctctttatatggatatgacggtaaaagaatatctggattttgtggctgaattaaagaagttagagaaaagcctgcgggcaggatatgtgaaggaagccatgaaaattacaaaaacagaggaagtatcgggaagactgatccgtaacctgtcaaaaggttaccgccagagagtcggttttgcgcaggcagtacttggatatccggaaatactgatcttagatgagccgaccgtaggattggacccgaaacagatcatagagatcagggatctcatcaaggaacttggaaagaaacatacgatcatactaagttcccatattttgtctgaaatctctgctgtctgtgatcatgtatttattatttcgcacggaaaactcgttgccagtgattccacggagaatctgttagagcggatgaccggtgcacaggagatcgagctgctagtgaaagcagaggaagatactgcggaaacagcgatccgtgaggtcgcacaggtggagcggtgtgaaaaaacagagtcgaaagaggatggcgcggtacagcttcttgtgacggcaaaaaaagatgcggatgtacgcgaggcgatttatcacacctgcgtggaacaccatatgccgatcttagagatgaaggcagcatcgaagtccttagaggatgtattccttgaactcacatcacaggaaggaggaacaaaataatgtttgcaatttttaaacgtgagatcagatcctatttccagactgtggtgggatggctttttattgcagcagtactcgctttatatggattgtatttttatgcttataacttgaggtccggttcgccttatgtttcgtattcgctttccgcagtttcatttattgtgatgattgcggtaccggtacttaccatgcggagctttgcggaggaacggcatacaaagacagatcagctgatgttaacttccccggttccgcttggaaagatcgtgtttggcaaatatcttgccatggtcggagttttctccattgcaatgatcgttgttgcgctgacaccgttatttttatccatttatggttccgtgccgcttggagaaagctatgtggcggttttgggattctggctgtatggctgcgcatgtattgcgatcggtatgctgatgtcagtggtaacggaaagtcaggttatcgcagcagtgcttggatttgcagcactgtttcttggttacatgatgtcgagtattaccagcatgatctcacagagcggtaatcttctgacaaaaatattaaacgcatatgatttgtacacaccgttggataaatttatgaatggctgcttagatctcacaggcgtgatctattttctgtcggtgatcggaatctgcctgtttttgagctgccagctgatccagaaacgcagatattcggttagcaccaaaaagatcgctccgggggcattttccatcggaatgatcgttgtcgcctttgccattgcggttgttgtgaacctggtggcaaatgagctgccgtccacggtcacagcaatcgatgcgacatccacaaagttgtactccatcacggatacgacaaaagattacttaaagacactggatcaggatgtcaatatttatgtgcttgcagcagagaaaaatgcggacagtacgctttcagagacattacagcgatatgaggatctgtccggtcatgtaaaagtaagctatgttaatccgtcgaccaatccgacatttttccagaagtatacgacggatgcacctgcttcgaacagtctgattgttgcgagtgatgcacgctccagagtgatcgattataacgatatttatgagtactcctatgattattcttcctattcaagaagccttgatggatatgatgccgagggacagatcacaagtgcactccagtatgtgaccaaagattcgagcgagctgccggttgtctatgagatcacaggacacggggaaacttcgctttccggcggattttcggaagcaatcgagaaggcgaatatgacactcacggagctgacattgttaaaagaggaggctgtgccggatgatgcatcagcaatcattatcaacgcaccgacttcggatttctccgcagatgatgcaaagaaagtgaccgattatctggaaaaaggcggaaaagcgctgatcacgaccaatttccagtacaaggatctgacgaactttgaaagtattttaaaagcatacggcattgagcgtgtggatggtattgtcatggagaatgacagttcctactattacaataacattccatactatctgcttccggaagtagagagcagcgattacacctcttctgtcagcggaaaatatatttttgcaccgtacagcgaagcgttcagttatgacgggtcttccgatgatgtgacatataccgcattgctgcagacaaccgataaggcggtatcaaagattgatgcagataatgcaacaacatctgaaaaagaagacggagatattgaaggaccatttacgatcgcacttgcggcggcaaagacagaaaatgatacatcatcccaggtcgttgtggcaggttctatggagttatttacggattccacagaccagatcgtatcgggaagcaacgtatcgatgtttactgatatcatgacgaatctgaccggcggggaggatgataataccagcgttattccggtaaaagactataagatgagcacgatcacgatcacgatcacttcaatttctacaattattggtggactggcagcaagtatttttataccggttgtactgattattatcggagttgtgatctgggcagtaaggaggaaaaaataatgcagaaacagaaaaaacagatgatcgttctggtcattttgctgatcctgctgatccttgcgtatataggcgtccatttttatagtaaaaaacaggaagaaaaggaaaatgccaaagaagaggcggaaaagatccaggtgacggatcttgaggtctctgatatcacacagttttcttatgtgctggatggaacaacactttcctttacaaaaaatggaacagagtggacctatgacggggatcagtcggttgatattgatgagagcgctttggagacacttttaaataaggcatcagcgatcacggcatcagacgaggttacagagtatgataacctggcggactttgggctggatgatcctgctaatacggttacgttaaaaacggattccgggctaacgacgatctacattggcagccagaatgagatcacaaatgagtattatctgaaaacgggcgacagtgataccatatatgttgtggacagcgcgccagcgaccggatttgataagagcgtcgaagatctgaccgcaaaagcagatgatacggaaactgaggcagaagagccatcggaggccgtggatgaaacagagacagcgaccgtggtgccgaatgaaacagaggccgttgaaacagaggaaacggaaacgaagtaagagagtgaaatgacaaatctgaatcacagagatgaaaataccggattgtatatgtgcagtccggtattttaagttcataaatttttaatttgacacttttggaaaaaagaggtaacatgaatgtgagaaagttcattaacgaactaattcgaaccgcaaagcaggaaataaaaagttatttaccggaagaaaaaagaatgtggagcagggatgatgtacagtgagtatgaaatatttggaaccaaccagcagatgagaaaagtgatcgagcaggcatgtgaacagctgatggagacctatggactgcgccatgtggagctggatatcctttatctgatttcccatgagaaacagaaggataccgcaaaggatctgatcgagatacagcatttgtccaaggcccatatttcaaaatcggtggacaatttaaaacagcatggatatattgagctggttgctgatgaggcggatcacaggaaaatacacattcgtatgactggtaaggcaaaacctgtgctggaagagtttgaacagatccgggcagatattttagagcgtctgtttgcgggcgtgacagaagaagaacgaagctgcttaaagcgggtaatgggcaagatcatgaagaatattcaggcagaacaggaggatgggacatgaaccaatatggagattttggaaaagaaacggaagaactgatgacaatatgtgaacgtaatgacagaatcccgccggagctgtttaaggagttcggtgtaaaacgtggtttgagagatgtggatggaaccggtgtgcttgcggggatcagcaatatttcaaggatcgatgcgtttaaaacggaggatgggaaaaaggttccgtgtgacggacagctctggtaccgcggttacaatgtgatcgacctgatccatggatttgagggaaaacgttttggattcgaggaagtggcatacctgctcttgtttggcgaactgccggatgctgcaaaattaggggcatttaagagcatgttagaagagtgcagacagcttccgacaaactttaccagagatgtcattatgaaagcaccgagcaaggatatcatgaattcgctgacgagaagcgtgctgacacttgcttcctatgatgagacgatcgctgaccaggagctgcatacgcagttagaacagtgcatcaagctgatcagtgtattcccgatgcttgcggtgtacggttaccatgcatacaaccattatatctgtgatgacagcctttatatccaccgtccgcaggagggattgtccgcagcagagaatctgctccttatgcttcgcccggataaggcgtacacggaactggaagcgcacgtgcttgacattgcgctggtacttcatatggaacacggtggtggaaataactctacgtttacaacaagggttgtgacctcatccggatccgatacatactctgtcatggcagcggcactttcttccttaaaaggaccaaagcacggcggcgccaatatcaaagtagtggaaatgatggatgatatgagaaatcatgtgaaggactggggagacagagacgaagttaaaaactatttggaacagcttgtcgacaaacaggcatttgaccgcaaaggcctgatctatggtatgggtcatgccgtttattctctttccgatccgagagcgcgcgtattcaaaagctttgtggaaaggctcgcggtggcgaagggaagagaaaaagattttgcattatacagtatggtagaaaatcttgcaccggaagtgatcgcggaaaaacgccatatctataagggggtttcagccaatgtggacttttacagtggatttgtatacagtatgttagacatcccgttagagctttataccccgatctttgcgatcgcccgtattgtcggatggagcgcgcaccgcatggaagagctggtaaatatggataaaatcattcgtcctgcataccggagcatcatgccggagaaagcatatgtgccgttagaagagcgataaaaaaatgagcagaggaaaattaatcttccttctgctcatgatttttcttgaccatcttatatacaaaagaatatgcccagatcagcaccgggatgatcacggttgcataaacagaggccatcagcatatccatatagttctcattggaagagagtgcacagacgatggtggaaatataaagaccggctaagataattgcgccaagaatggcaagaatacgttttatttttttcaaatccaaccctccagtttttagtgtacttatcggcatattgttcgcaaaatgccggaaatatattaagattatcctagccgaaagtgacggaagagtcaagatgcaaacatcgtgaacagagatttcgctttaaaaaataaaagtccctgaaagcatgtcgaaaagactgaaaaactgtatcagtggaaggattccaaaagttgatgcagtccgcgactttctctccagaataaacccggatgaaatacgcagcatacatgaagaaatgattgatatcataaaacgtaatcggatattccgggaaggaacgataggcggatagaaaatcagcagaaaaaatatatagggaaaaagcagggggaattttgcgcgtattgaccaggaacgaagggtaaccgcagatggaatgctgataactggattatttataaaaatgcatagataaaaaagttaaaagcgaaatccctgcatcgtgaattaatgaattgcaaaaacagcagatatttgctataataatatatgcatgttaaatgcaaccacaattcacatagaaaacgaggaaacagactatggcattattagaacagtggcagaaaattgcctataatgagaaaacagacagaggggaattacagagattctggcagagatatttccttttggaaaaaggcgtatatgagaagcttcttacgaacccggatgagaaggtcgagggaacggtaaaagagcttgctgataaatataatctgagcgtcatggagatgacaggttttctggatggaatcaatgacagcttagtagagccgaatccaatcgataccatggaggaggatacaaaagtaagccttgcatttgacaaagaaaaattatacaaaaacatggtagatgctaaggctgactggctgtatgagcttccacagtggaatgagatcttcgatggcgaaacaaagagaagactgtacttagagcagaagaagtccggaactgttattgtcggaaagaaaatcggacgtaacgatccatgcccatgtggatccggtaaaaaatataaatactgctgcatgaataaataagtaaaacaaaatcccggtgttttgaatgatatcagaacacagggatttttatgtatctgaaaggagaaattatcattatgaaaaaaataaaagaattttttgcggatatgacggaaactgtttctgtcacaaaactggatggaactttgatcgttgcgatcgcagcgctttccggcgtgatcatcgggatgctgatctcaccgcgcaaaaatgcaaaatatggctgtggtaacggtacgacttatattaccaacaatggagaagatgactgggactgggatgacgaggatacagaataaaaattgtcataaaaaccagatattgtcataaaaagaaaacctgtaaacgctgtttcaaagcataaatcagacaaagggagagagaataatacaagacagtcagatcattacggaagaaatgataaaaatacgaaggactgtcccctttttcatgagggagaaaaggagaaaaaatgacaattctggattgttcggtaacaggctgtatgtacaacgaggcaaactgctgccacaaaggtaatatcaaggtggaaggagaagacgcaaaagaaagtgaagatacctgctgcggaagttttgcggaacgtggggaccgatgcgcaaaaaacgtaacgggagatgcaccgaaaaatattgaagtggcatgttgtgctgcgaactgtgtctttaataaggaagagaaatgcagcgcagaccatatcggtatcgcgggtggtaatgcctgcaactgcagagaaacggaatgcgcaagtttctgctgcggctaagaagtttttgcgccagcggtaacaaggacggtaaaaccggagattttgtatagaagtctccggtttttcttatagcggaatctttagaaatctgacataaaatgcacagaaaaaattcaggtaatcttaacttgtattttggttagatgagacttataatgcgaatagaaaataagtcatagaatacatttctgagtgtcaggaatgcataagaatgggaggcttttagaatgagaaaaaaatctcatatttcgcttgcaagatatatcgtaaacagtctggatgacaaagagttaaaaaaacacaggttttcattttatatcggaagcgttcttccggatatcaagccttcttttatttacaaaagacatgagatcaatggaacctttccttatgtaaaaaaacatattgcccggctgtcggaagggcagaaggtcatgaataaaaagaacagaaaatactatagagatttaggacaggtcagtcattatctggcagattattttacatttccacacaacaaaatatatccgggaggatttaaggatcactgctcctatgaggaaagactgaaacgcgatttgagatcctatatcaaaagcggagaggctgagaggcagcatatttccggcggacattttgtggatgcgaaagcactctgcgattatatccagaaagcgcatgatgattatattgaacgaaaacatgatgtcgcagatgatatcacgcatattgttgaggtaaatcgcagggcaattgagggaatgatagaagttcttgcgagaaagagcgaaaatcaccgtctgaaacactcataataagggaaaacatggcatctggtgtcgaaaaatggtgagaagtggcatgctgttttgattgatttttgcatgatttaggagtaatatgtaaatatcaacgaaaacagtatcataagtactataaaacgccagcaacgcgatgaaagtggcataggaatcttggcagtcaaggaggattcatatgaacagaatcgaagaaattcaaagagaaattgagtctgtccggtcagaactcaatgaatcatttttacagaacgatgaattcgaggaatactatcgaaagagtacggaactggataaactgatcgaagaatacttagagagaaaacagcaggtacagatgagctgacagacaggcgaacaggaaaaatattattttaagaacgataggacaaaggtactaccgttctttttttgtgcaacaaattagtaacattaccgcaaaaagccgttggaaaatcaaggaaattcttgattttttcttaagagtggtttaagatgtatataaatgtggaggaaagtggtacaaaatggtgtgaagtggtagatgagatcctgtttggtggaaaatcagatctttcggattttagttccactgaaaggcaggtgtttgtgttatgttcatgggagaatacaatcacacagtggatccaaaaggcagactgattatccctgcaaagttcagagaacagcttggcgatgaatttgtagtgacaaagggattggatggatgcctgtttgtgtatacgaaagaagaatggcacaacatcgaggaaaagttccgggggatttccatgacctctaaggacgccagaaagttttcacgttttttcttcgcaggagcagcggcattagaactggacaagcagggaagaattttacttcctccggttttaagagagtatgctgatttacaaaaagatgtcgtcttagtcggcgtgttgagccgtgtggagatttgggataaaggcagatggttagaaaatacctatgacgaggatgagatggatgacatcgcagaacatatggcagagttgggatttagcatttagaggtgagggcagtggaatttcatcattattctgtattattgaatgaaacaattgaaaatttaaatatcagaccggatggaatctatgtggacggaaccttaggcggtggcggacattcttaccagatattaaagcgtctgggagagaatggaagactgatcggaatcgatcaggatgcagatgcgattcaggcggcaggcgaacgccttgcagagtttggaaacaaagctacactgatccgcagcaattatgccaatatgaaagaagaactgcatgcgatcggagtgaacggggtagatggcatagtgcttgatcttggtgtttcttcttttcagttggatacactggaacgtggattcacctaccgtgaaccggatgcaccgcttgatatgcgtatggatgacagacagagccagacagcgaaagatatcgtcaatggctacagtgaaatggacttataccgtattatccgtgattacggggaagataaatttgcaaaaaatattgcaaaacatatcgtaaaagaacgacagaagaaaacgatcgagacagcgggagaattgacagatattatacgcgcagccattccaatgaaagtacaggtgaccgggggccatccggcaaagcgtacatttcaggcgatccgcatcgagttaaaccatgagcttgaagtgctcagtgatcacttagacgagatgatcgatctgttgaatccgggtggaagaatctgtattatcacattccattcattagaagaccggatcgtaaaatctaatttcaagagaaatgagaatccatgtacctgcccgagtgatttcccggtgtgtgtttgtggaaaagtgtcaaaaggaaaagtgattacaagaaaaccgatccttccatcggagaaggaactggaagaaaattcgagatcaaagagtgcgaaacttcgggtgtttgagagaagataaagcagggaggaattaacatgaagaatcagacagagaggagagcttccgaaagaaattactatgtggatggcaatacagtgcgccgcatggaagcagtgcctgattaccgaagagaaagacgggaaagagaagagagagaacgggaagaacagctgcgcagaagaaaacgccaggtaagaagaaatcaggaacgccagcttcggatgagcaagaggtatgtggtattccttacaatggcagtgacagtgtttggcgtgtttgcaggtacttacataaaaatacagtctgatatgacggcaagaatgaatacgatcagcagcttagaaagccagatcgctgatttaaaggcggacaatgatgaggcatataagagaatccgtatgtctgtagatcttgacagtgtcagagaaaaggcactcaatgagcttggaatgtcatacgcaaaagaatcccagattatctattatactgttgacaatgatgattttatgaatcagtacagtgagataccgcagaaatagcagagagatactgacataagaaatgcaggggtaaggatggcagcaaagaaaagaagaaaaccatggttgaaatttccaaaacgcatgcagaaaaaactgatcgttatgttcagtgcgatcgcagttttgctgacaggcctgattggaagacttatgtatattgaatataccagtggtgataaatatgagaaaattgttttatcacagcaggaatatgacagtcagaccattccgtatcagagaggcgatattgtggacagcaagggcacggtacttgcaaccagtatcgccgtttataatgtcattttagactgttccgtcatgacaagcaaagatgagtatattgagcctaccattcaggcacttgcaagttgttttgaggacttagacagcaatacactgtatggctatgcaaaagatcagaaagacagccgctatattgtattgaagaaaaaagcttcctatgaggaaatacagccgtttgttgagatgcaggaggctgttgatgaaaaaggaaaaaaggtgaatcctgacatcaagggtgtctggtttgaaaaagaataccagagagagtatccttatggtgcgctgggaagttctattgtaggatttacggcttccggtaacgttggagtgaacggtctcgaacagtattacaacgagacattaaacggtgtggatggcagggaatacgggtatttaaacacagataataactttgaaaaaaccatcaaggccgcaaaaaacggtaacacggtggtatctacgatcgattctcatatccagtctgtagtggaacagaaaattgcggattttaacgaggcctataccggaaatttccgcgaggatgagccgggagcgagtcatgttggtgtgctgatcatgaacccgaataacggggatgttcttgccatggcaaattatcccaattatgatctgagtaatccgagggatctttcggcgtattatacgcaggaggagattgatgcgatggatgaagatgcacagatggatgcgttaaaccagctctggcagaatttctgcaccacatatacctatgagcccggatctactgcaaaaccgtttacagtagcagccggacttgaaacgggaaaagtttcaacaggagacagtttttactgtgatggatatgagcatgtgggaggacatgatattcactgtgtaaacagaagtggacacggaatggaaacgcttgaacagacgcttatgaattcctgcaatgatgcgatgatgcagatatcctaccgtctgggaagtgatatttttacaaaatatcagcagatcttcggatttgggcagcggacaggaattgaccttccgggagaagcgcgaacagactctttgatctatacggcggataatatgggaccggtcgatcttgcaacgaatgcgtttggacagaattttaatacgacgatgatacagcttgcaacggcgtattgttccctggtcaatgggggaagcctttatcagccgcatgtggtaaaacggatcacagatgaaagtggaaacacgatcagcgaagtgacgccgactcttctgagggaaactgtatcgaagtcaacgagagatgctttaaaacagtatatgtattctacggttacaggcggcactgcggtaactgcaaaagtggatggatattccatgggaggaaaaacaggtactgcgcagaaagcgggacgtgacggggtgaactatctggtttcatttattggatttgcgccggtcgaggatccgcagcttgtcatttactgtgttgtggatgaaccgaatgtcgcagaacagttccacagtacttatgcacagaatattgtaagagagatcttagaggaagttcttccttatatgaatatataccgggatgaagatactaccggtattcatgaaggctggggaatcaagggggaagatgaaggagatgtcggtgatgtgacggcagcggatgttgcgaattctactgccgaggagagtctggatgtgccggatacgacggatgaactgccggaaaatactggggaacagcctgccgaagatattgatccgggatcagatgaaggacagcagtagggaaaagtataaaacaaaacacataacctcacaaaagtaagaataaaatgctatgaaaacttttgtgaggtttttgtatatgcagcaggaacttcctttctatagaagtaagacatttcatcgtaaaaaaatcatggtgatgtttacagccgtgttcctggcacttttatttttgatgggaaggctggtgtatcttatggtgttctgttcggaatattatggacagaaagcacagaacctccatgagagggaacgtgatattaaggcggcaagaggaaaaattttagatgcaaacggaatggtgcttgccacgaacaaatcagtctgcaccatatcggttatacacagccagattgaagatgaggaggcagtcgtaaaagcattggtaaaagaacttgggctgtcggaggaggcggtgcgaaaaagagtggaaaaggtaagctccatcgaacgtgtaaagacgaacgtgcccaaagagacaggggataagatacgggcatacaaacttgcagggatcaaagtcgatgaagattataagagatattatccgtatgatacacttgcatcgaaagtattaggatttacaggtggtgataatcaggggatcgtcggacttgaagtaaaatatgattcctatcttcagggaacgaacgggaaaatactcacgcttaccgatgcgcggggaattgagattgaaaatgccggtgagacgcggcttgagccggtcaatggatacgaccttaacatctccatggattataacatccagttatattgtgagcaggcggctgagaaaacctatatcaaaaaggatgcaaagtatgtgtctgtgattgtgatgaacccgtcaaatggagaaatttttgcgatggtaaattatcccgaatttcatctgaatgatccgtttacactgacggaagaggtaaatgtcccggcagagaagaaacaggatcttttaaatcagatgtggagaaaccagtgtatcagcgatacttatgaaccgggttcaacatttaaaatcatcacagcggcagcagctttagaacagggtgttgtgaaactgacagataatttctactgtcccggatataagctggtggaggaccggcgtatccggtgtgcaaaaacaaccgggcatggagcggaaacatttgaaacggggattatgaactcatgcaatcctgtttttattgagcttggggaaaaacttggagttgaaaatttttataaatatttcagccagtttggactgctctcgaaaacaaatgtggatctgcccggcgaagctgcaacgatcatgcataaaaaagaaaatgtcggtccggtagaacttgcgactatatcgtttgggcagtcatttcagattacaccgatgcagcttgtgaccacggtttcttctattattaatggagggcaccgtatcacaccgcattttggagtaaagatcaccggggaaggaggaaaagaagtggaaacgctgcggtatgagacaaaaaatgatatctgcacaaaagaaacatcggaaacgatgcgatatcttttggagagggttgtctccgatggcagtggaaaaaatgcaaaaatagaaggggtttccatcggtggaaaaactgctacgtcacagacacttccgagaagtgaccataaatatatctcgtcgtttctcgggtttgccccggcggatgatccgaaagtactggtgcttgttgtgatcaacgatccgaaaggaacttattatggtggtcagatcgcggcacctgttgccaaagaaattatggaaaacattttaccgtatcttgcgaaatgatgaaaaatgacgtatactattgtgttgttaaaaaagtacatgaggtgtgaataatatgacatatgaaattgtaataccagtaattatcgcatttgcgatcagtgcactgttaggccctgtagtgattccgtttctgagaaaactaaaggtaggccagaccgaacgaaaagaacttgaatctcatttaaagaaaaatggaacaccgacgatggggggaattatgattcttgcaagtatcatcataacatccctgttttatgtaaaagattatccgaagattattccgatcctctttatgacagtcggatttggtgtgatcggatttttggatgattatttaaaagtagtattgcgccgctctgacggactgcttgcgtggcagaagatgattcttcagatcattgtcacaggtgtatttgctgtatatatggtcaaatattccggtgtggcgcttaccatgctgattccgttctccggaggaaagtatttagaccttggatggctggcaatcccggtcctcttttttgcagtggtcggcactgtaaacggaacaaactttaccgacggactggatggattggcatcgagtgttacgatcatggttgcgactttcttttccgttgtagcgatcggaacaaatgcagggattgcgccgatcacctgtgcggttgtgggtgcattgcttggatttttactgtttaatgtatatccggcaagcgtttttatgggagataccggatctctggcactgggtggctttgtagtgtcaacagcatatatgatgcagatgccgctttttatactgatcgttggactgatttacctcgtggaggtcctgtctgttatcattcaggtcacttattttaagaaaacaggcggaaaacgtattttccgtatggctccgatccatcaccattttgaacttggcggatggtcagagacaagggtcgttgcggtattttcaatcacgacagcaatcttatgcctgattgctttactggcgatgtaaaagacggcatgcagtctgtggctgcaggtttacccgtggatagaagtctatgactgaaaacaatagaatgcacgctccgcgaacattctattgtcatgaattagatatatggaatggagtaatgcatggatctgacaggaaaacaggtattggtggcaggacttggaaaaagcgggattgctgccggagcgttactaaagaaaatgggctgtatggtctgcctgtttgacggaaatgaaaaattcgaccgcagtgcatggaaaaaaacatatcctgtattttcggattgtccgttgtggattggagaactgccggatgcggcagtacaggagatggaacttgcagtggtaagtcccggaataccgcttgatacgccggcgatattaaaattacaggctgtgggagtgccggtcgtaggagaggcggaacttgcgtaccggtttgaaaaagggcgcgttgcagcgatcacgggtacaaatggtaagacaacaacgacgacactggtgggagaaatcttaaaaaaatgttatccggaagtctttgtggttggaaatattggtattccttatacttcaattgtggagaaaaccacagagcagaccgtcacagtgacagagatcagcagtttccagttagaaacgatggaaacatttcatccgtctgtttctgcaattttaaatattacgccggatcatcttgacagacatcacacgatggaggcgtatatccgtgcaaaggagagcattacaaagtgtcagacaaaggaagatacctgtgtgctcaactatgaggatgaaatacttcggaaatttgccgaaacattaaaagtaaacgttttgtttttcagcagtaaaagaccattggaagagggaatttatctgcaggaaaatacgatctggatcgctggaaaagaaacagaacggcagcgcctgattgatgtcggtgaattaaaacttctgggcatacataattatgaaaatgttatggcggcttccggcactgcactttgtatgggagcaccgatagatgttgtgcagcgtgtactaaaagagttttggggtgtaaaacaccgcattgaatttgtgagagatctgcatggtgttttgtactataacgattctaaggcgacaaatccggatgcggcaatccgcgggatcggttcaatgaatcgtaagacactgctgatcggcggcggttatgataaaaatcttgaatttgatgcgtggattgagagctttgatgggaaagtaaaatgtctattactgatcggacagacaaaagataagattgcagtctgcgcaaggaaacatggttttgagaatattgtatgctgtgatacattaaatgaagcggtaaatatctgttataggctggcaaagcccggggaagcagtattgctttcaccggcatgtgcgagctggggagattttaaggattatacacagcggggagaactgttccggcaatatgtcatggaactgccggaataaaacggttgtggtgcttgatcagacaggttttgtgtaaatgaggaaaaattatggcaagaagacggaaaaatgaaaaaagacaaaaatcgatccggtattttgattacagcctgttatttctgattatatttttgttatgtttcggactgattatgttatatagtaccagttcctactatggctcaacaagatttaacgatgcagcatattatgtaaaaagacaaatgtatgcaagtgcacttggaatagtggcaatgctttttatttcaagaatcccatataagttctggatgcagctttcaacgcttgcgtattttgtggcgctggtactttgtacagcggttatttttgtcggaacaagtgcaaagggacagtcgagatggctcaggatcggaccgatccagttccagccatctgagatcgcaaaaattgcggttatcattttccttgcgacgatcatctataaaacgcctaaacgcattggggaaattatgagtctgcttaagatcatgcttttgatttcaccggttttggcagtggttgcgtataataacttaagtacggcgatcattatccttggaattgctgtctgtatgttatttgttgcgagtccgaaatatttacagtttattttaatgggaataggagtatgcctttttggtgctctgtttattctgctggcgtcttaccgtgcggaacgtgttatgatctggctgcaccctgaggattatgaaaaagggtatcagacgctgcagggattatatgcgatcggttcgggaggccttttcggaaaagggttaggagagagcatgcagaaactgggatttatcccggaggcacaaaatgatatgatcttttcggttatctgtgaagaacttggactttttggtgcagtctgtctgatacttttgtatctgcttattatctggcgtctgatgatcattgcaaacaatgcatccgatctgtatggcgcattgatcgtagttggtattatggcacatttgtccattcaggtactgcttaatattgcggttgtaacaaatacaataccgaatacgggagtatcactgccgtttatcagttatggaggaacatccatatcgattttgctggctgagatggggctggcactttctgtatcgaggggaattaaattagaggttgcctgattatgaggatcaaagaacagagaaaaagaaaaaaaagaagaagaatcgggatctgtatctttctggtagttctgatgttgtttgcacttgcggcacttattgtggtaaaggtatttacagtccagaatgtagttgtggaaggaaacagtctttattctgccgaccagatcaaaaatatggtgctggacgatgattattcgtggaacagtctgtatgtagatctgaaataccggtttgtggatgtcggggaagtaccgtttgtggatacgatggaaatttcgctggatgatccgcatacattgcggatttcggttacagaaaaaggtattctgggcagtttttatattgatacgcttggacaatatgcgtactttgataaagacggatttgttgtggaaacttcgtcggatgtaatcgaaggagtgccaaagatcacgggagttacctgtgatagtgtggttttatacgaaaaactgccgcttgaggatacaaaactgctgagaaatctgttgacactgacacaactactgaaaaaatatgaacttgaaccggaagaaatccactatgacagtgcaatgcagccacagctcacttacggaacgattgcggtcaatgttggttcagaagattatctgacacagaaaattgcgagactttccgcaattatgccacagttgtcgggactctccggtatactgcatttagagacatggacgccggatacgacagatattgtgtttgaccgtgcagatttgtaaaaaaaagtgtaatcttttttgaaaaatcagttgattaattgtaagaaaaattatattatagattatatgagttttttagctgtaattttttaagctaaatgaaggaggaactaccttgctggagattaagacaacagaagcggataccagtgcaaagatcatcgtgatcggagtaggaggagctggtaataatgctgtaaatagaatgattgatgagagtatcgggggagtcgagtttatcggagtaaatacagataaacaggcgttggcactctgtaaagcaccgacactgatccagatcggtgaaaagctgacaaaaggacttggagcaggagcacagccggaaatcggtcagaaagccgctgaggaaagcatggaagaattatctgcagcagtgaagggcgcggatatggttttcgtaacctgtggtatgggtggcggaaccggaacaggtgcagcaccggttgttgcaaagattgcaaaagagcagggaatcttaacggtcggcgttgtgacaaaaccattcaaatttgaagcaaaacagcgtatgttaaatgcactttccggtattgaccgtttaaaagagagtgttgatacactgatcgtgatcccgaatgataagcttctggagatcgttgacagacgtacgaccatgccggatgccttaaagaaggcagatgaagtgttacagcaggctgttcagggaattacagaccttatcaatctgccggcactgatcaatcttgactttgctgatgtttccactgtcatgaaggacaagggtatggcacatatcggtatcggtaatgccaagggagatgacaaagcaatcgaagctgtcaaacttgcagttgcgagtccgctgttagagaccacgatcaatggtgcatcccatgttattatcaatatttccggtgatatttccctgatggatgcgaacgatgcagcaagctatgttcaggatcttgcaggtgataatgcaaacattatttttggtgcgaagtatgatgagtctatgacagatgaagctacgatcacagttatcgcaacaggacttgagaatgcggcagcaccgaagagcaagattatgccggatctccgctatggaaatacaacaaacgttacaagaccggttggaacacctggcatcaacagacaggcggcaaatcttggcgcaagtgtacaggcacatacgcagacacagacggctgcaccatcattttctggtattcagagaccgcgtcagcctgagagcacagtacagccaatggatattaaaattccggatttccttaaaaattcaagaaaataatatctgagataaaatattagaaaacataacaacagatatgcctgcaaagtacgcgggctgctgtagcagtttatacatctgaaaagagatttatgtgtttgaagagaaaacacataaatctctttttatatatagaaaagaacaacgcttgtcgaaaataagggatgatttgcgggatttggagtacctgttttgacaaaaagtaaagttgtactgttttataataacagtaaagatacgaaagagtctggagaaaaggggtgagacgagatctatgtattttatgcagatgtgttcctgcttgaaaatctgtttatggactatatggcaatacttggatgcaactgcctgctgaaacggaggatacatcccgggcggctgtttgcggtatcgctgatgttttcactgattcatctgtttctggtgtgctttatccataacaggatcctgtattttttgatcgcacattttgttttaaacacagggatggtatttttttgttttggctgggaaggaaaacgcagttatttagaaaactgggttgtgacctattttatgtgcgtgatacagggaggtgcgcttgagtggctcttagaacagcatatattttcgcaaaatgaaattttacagatgcttgttgtggcagcggtagttgttacggcagtgatctgttttggtgaaaggcgcgtttatggaaatcatatatatcctgcagagttaaaaaaaggagaaaggcatatcaggctgcgtgcatactgggatagcgggaatcagctgacggatccgtacacaggacaggagatcagtattctatcgggatctgtggcggaaaaattctttacaaaagaaaaggatctggttcgttttgtgccatatcggtcactgggggaaaaggatggactgatcgcggtaacaaatgtggatgaaatgactgtttttcagggaaaacgtgcggtaaaaatcccacatgcagcgattggaaccgcagataagatgctgtttgacggtaaggaatatgaaatgctcttaaatgcttcgagcattatgccacagggcggcaagacagaaaataagaattaaggtggaattgaaaatgtacataaaatttgcgataccaaagataagaacgatgatatttcctggtatttttcgaaagaaaaaggatgaggtgcattatatcggaggcgcagaggtgcttccgccgccgcttgccggtgaagatgaggcggtatgcatagagatgcttaccagtgatgagagcggacagcttgcaagaaaacagctgattgaacataacttgcggcttgtggtgtatattgcaaaaaaatttgataataccggcgtcggggtggaggatctgatttctatcggtacgattggtctgatcaaagcaatcaacacatttaatcccgggaaaaatatcaaacttgcgacctacgcttcgagatgcattgaaaatgaaattctgatgtatctgcggcgaaacagcaaaacgagaatggaagtgtctattgatgagcctttaaacgtggactgggacggaaatgagctgttactttcggatatcttaggaaccgatgaggacgtgatctatcacgacattgaaacggatgtggaacatcggctgcttaagacagcgattggaaaactatctggcagggaacggatgatcattgaactgcggtttgggttaaattccatcgatggagaggaaaaaacccagaaagaggttgcggatatgcttggtatttcccagtcctacatatccagactggaaaaaaagatcatgggaagactgaaaaaagaaatcgtgcgtcttgagtaaagtctctctgctttttgtctggtaaaacgacaaaatagttaaaaaatatataaaatatgaaaaaatattgtgcatatagctgaaaaatagtataatgaaagaaaagcagacagaatgggggacttcatatggtattggaatttttaggcgcagcacatgaggtaacaggcagttgccattatctatcctttggagataagcatatactggtggactgtggtatggaacaggggccggatctgtacacaaatcaggagattccggtcaatgcagcgatgatcgattatgtatttgtgacgcatgcacatattgatcattccggattattgccgcttttatacaatcatggtttccgcggcaaaatatactgtaccttagcgaccaatgaactctgcaacattatgctcaaagacagtgcacatatccagatgttcgaggcagaatggcgcaatcgtaaggcaaaacgggccggaaaaccggaagtggtgcctctttatgatatgaatgatgcgatgagcgtactgagccattttgtgccgtgtgattatcagaaaaagatcaaagtctgtgacggacttgagatccgttttgtagatgcaggtcatctgcttggatcctcaagcattgaaatgtgggtgagggatgatgatggtacagaggtaaaactggcattttccggtgatatcggaccaggtaaccgtccgctcatcaaagatccggaatacatcaaagatgccgattatgtgatcatggagtcaacctatggtgacagaaaacacaatacacctccggatttcgcgatcgccctggcaaaagtgatcaaagaaacattgtatgaacgcggcggtaatctggtcgttcctgcattttccgtgggcagaacacaggagatgctttattttatccgcaggatcaagagtgagcatctgctgccggaatttgaaaattttgaggtatacatagacagtccgttagcggttgaagcgacaagcatttttaacaagagtgtggaagaatgttttgacgaagatgcgagagcacttgtgcagcaggggattaatccgatcggatttccgggacttaaaatggcgatcacaagtgatgagtcaaaaatgatcaactttaatgataatcccaaagttattatctctgcatccggaatgtgtgaggcgggacgtatccgccaccatttgaaacataatctgtggagaaaagattccacgatcttattcgtgggatatcaggtgccgggaacacttggcttttcactcttaaatggtgcaaaagaggtaaggctctttggtgagacaatcgaggttgcggcaagaatcgagaacctgccgggtatcagcggccacgcagatgtggaacaactgacaaaatgggcggcagcattcgaaaataagccgaaaaaagtatttgtggtacacggggaagacaaagttacggagcagttcgcggatcatttgaaagatactttggggtatgaggcctatgcgccgttcccgggagatgcatttgaccttgcaaccggcgagcaggtacgcgaaggatccagagaacgggcagagaagaagataacagagaagagccgtgcatcgagcaatgtatttgcaagactgcttgctgcaggtcagagacttcttacggttatcaataagtgtgagggaatgccaaacaaagaacttggcaaatttgcagatcagatcaatgctctgtgcaataaatgggatcgttagagcgacagataatgacgaatggattttaacgcagatttttctaagcggctgacctgagcctgggagatatggatctcgtcagccacttccatctgcgtttttccttcaaaaaaacgaagctttaagatataattctcgcgttcgtttaaccggtcgagagcatcgtttagggacagctcttcaacccagttttcttcccggtttttcttgtcactgatctggtccatgacatagagtgtgtcaccgccatcggtgtagaccgggtcataaagactgagaggactctggatggcatcgagggcgaaaacgatgtcctctttagaaatgccggattcggtggcaatttcgtcgagagtcggctctttgttttccgtctttgagagtatttctttggtgtggattgccttgtaggcagtgtcgcgcagggaacggctgacgcggatagagttattgtcgcgcaggtaacgtcttatctcacctatgatcatgggaactgcgtaagtggaaaacttaactccgatcgtcggatcgaagttgtcgatggacttgatcaggccgatacagccgatctgaaacagatcatctacattttcgtgattgccggaaaaacgtttgatgacacttaataccagcctgagattgcctttgatataagtttctctggcggcggtatctccctgtttgatccgtgcaaacagagcatctttttcctcttctttcaaaatggggagttttgcggtgttgacgccgcagatttctactttataagaagccatgctgtttatcctccggaattttatctttaccataaagagcatgcttcaaaaggatgaattttattcagaaattaactttttttccaatgggtttcgtgctaaaataaaaaggtatcaaaaatcagaacagagtgtggtgcagtgatgatgaaagacatgatcgataagagaaatgaacgggaacgtatcgcaagaagtattatcaagtactggaatgtgaactatattccgagaacgcaggctgattccgggatgcagaagcagactgcggaggcagaaaatgcgcaagaccagactatggatccaaatatgcaggaagactacaataaggcaacgaacgcatattcgggtaaatatggtcaggagaaagacttagacgaagtgacgaaagatcagattgataagatcctccatgagaaggcggaacatattcaccagttgtttgaaaatgggtgagtagagtaaccatttcctgttattctgcatatgatatcacaaggaaaatggcagaggaatcaagatgtctgagatcatacttcgcaaataccatggagttggcaatgattatctgatctttgatccgaagaaaaatgatgtagttttaaatgagagattgataaggcagctttgtagacgcaatattggtgtcggtgcagatggaattttgtacggaccggttatggaagataaaaaaattaaagtacgaatttttaatccggatggaagtgaagctgaaaaaagcggcaatggcatccggattttttcaagatatttaaaagatgccggatatgtaaaagaaaggcaatattatctgaccacgaaagcgggggaaacactggtaacatttttggatgatgctggaagttgtatgcgtgtggatatgggatatgcggtctttgaggcagaacagatcccggcacttggatttgagggagaagttgtgggagaatcgatatttttctgcgacaatttttataatgcgacctgtgtatccatgggaaatccaaattgtgttattatgcttgagagggtagatcgtgagaaagcactgcatttaggaccatatgtggaaaatgcaaaatattttccaaaccgtatcaatatgcagctttgtcagatcgtagatgaaaaaaatatacaggttgaaatttatgaacgcggggcggggtatacatttgcttccggcaccggagcctgtgcggcagcagcggcttctcaccgtctgggattagtcgaagatgcagtgaccgtacatatgcacggtggagatctttttatcgaatttgaaaaggatggaagaattttcatgacaggaccggtcgtatatataggaaagattactgtggcagaacagttttttgcctgacagaaaacgaaagtggcgaaaagaggggaaataagttacaatgaaagaaaggtatcaattacgccaggcagcgggggcatactggcttttggatatggagcagggggaacaatataaaaaaccattcatgttgaacgagtgcggtgcatatatatatcgtgcgtatatttcaggaatgtctgaggatgagatcatgcaggcatttgcaaaagaatatggattgtcattctcctgcgcacaaagcgacgtagggcagtttatgatggagttaagacaacagggaattatttgagaatggagcaggtatgaatatattgctagttgggaatgccggcaattttatgcggcttatgatcaacagactgaataaggaaggacacagggtctttgtgctgacagaagaaccaaagaagggatacagcctgaagaaagtatttgaagtgtatcatttttcgtatgaggatgcctgtgtgcgggaggtattagagagtattatgccacaggtagtagtttttctgggggcatatgaccataatttttcctggaacagggtggaaaacacagcggcgtcctatgcagcgggacttacgaatatactgatgaattataccgctttaaagaaaggcaggtttgtctatctttcttcggagagtgtttttggcggtggaagcgcacagtttatgacagaggatgatcctaccggggcatacagcaagaaaggccaggcgatcgctatcggagaagatatctgtaaaaattatgcaaggatggggaatgatgttgtgattctccgcctcgatcatttgtatggggaaatacgaaagaaagaggatacagatacgatctgtgcggatatgtgcctcgaagcagtccagaccggagagatcattgcgtcgcagaatgaaaaaataatgcttctgcatgaggcggatgcggtggagtttatctaccagataatggtggcaaaagaccataaacataccctctatcagttatcttccggggagaaaatgtcacggtatgagcttgcccaggctgttgccgcaggaatggagaatgaggtcagtatcgtagaagaggaaaacaaaaaataccgggaagttatgctttccggtaaaagatacgatgaagaatttggaagccgtgtgcttcatcatgcaggaacagatgtggaaaagattgcggcttatttcagcagacatgtatctgaatttacagatgcagggcagaaaaagggacatctgtttcgaagattaggcagcaggacaaaggaaatcataacgaatctgattccttttatggaaaacctgatttgttttattccgtttttcatgttgaataaccgtgcagtcggaagtgaatactttcagaatattgatttttatcttctgtatgtgctgttgtttgcacttgtatacgggcagcagcaggcaacattttctgcattgcttgccgtggcagggtactgtttccggcagatgtaccacagaagcggatttgatgttatgcttgactataatacctatgtctggatcgcgcagcttttgatcttaggtctggcagtgggatatctgagagaccagcttcgtgcaatgagggaggaacagcggcatgaagtatcatacttaaccaagcagttagatgatatttcggatatcaatgtcagcaatgtcagggtaaaagaaattctcgcaaaccagatcgtaaaccagaatgacagttttggaaaattatatgagatcacatccagtttagagcagtatgaaccctgtgaggtacttttttatgcggcggaagtacttgcaaaactgatgggaagcaaagatgtggcaatctatacggtggcaaaccgttcctatgcacgtcttttttctgcaacatcggagaaagcacgcagcctcggtaattcaatcaattacagcgagatggatgccatgtatacggtgcttgccgggaagaaagtttatattaataaaaatatggatgaaagatatccgcttatggcaaatgccatttattcggaagatgagatgcagctgattctgatgatctggggaattccgtgggagcggatgacgttaggacaggcgaatatgctgacggttatcggttatctgattcagaatgcggtggtgcgtgcaaaccgttatatttctgccttagagcagcagcgttacataaaaggaacgaatatattagaaccggaagcctttttagcacttgtaaaggcgtatttaaatgcgcgtgataaaggattgacacagtgtgcactgctttccgtggatacaaaggaaaatgaccgtgatgaggtcgggaaaaggcttatcaaactccttagacaaagcgattatgtcggtgaacttgaaggtggaaaaatgtatgcgcttcttgcaaataccagtgcaaaagatgcaaccatggtaaaagaaagatttgaaaaagagggtgtgtcctgccagatacaggaggatgtatttgtatgacggttgcagaaaagagattttgtatcgttcttctgatcaatacggctgttgctgttttatatgtgataggaaacagcaggatcaggcagaaagaaaaaaatacagatattctgatgaaggggatcgtgatgtttctctgcccggtagtgggaccgttgttttttttggcgggactggtgtttaacaaggtttttttccggcagaacgtggatcttgaggatgttattttcagcaaggagcgtgtaaagacacatcttcgggcagatgaggaaagggaaggaaatttagtaccgattgaggaggcacttgcgatcagcgacaaagacagtttaagaacgctggtcatgaatgtggtccgtggggatgtacagaattctctggcatccatctcgcttgcgttaaacagtgaggacacggaaacatcacattatgccgctacagtattaagggatgcattgaatgatttcagaaagcgtgcacaggaactttaccttcagatgaaacaggagggagttgatgcggcagaagcagcctgtatcctgattgagtatatgcatggggtattgatccaggaggtgtttcatgaaaaggaacagcagacctacatcgatatgatggaggaggcatgtaattttctggatgaaaaataccaggagaaactgcaggcttcctatattgagggactttgcgttctgcttcttaagataaaggattttaagcgcatgaaatactggtgcgataagagcagggaactctatccggcagaattatctacctatacctgttatttaaaactttattttacagagggaaacaaaaaacatttttttgatgaattggaaaaattaaaaaattcagatattgtgatcgacagggaaacattggaattaattcgtatttttagctaaaggaggtgatggcagtgtcgatgaaagtcctgactgtgttacagtttatcagcattttcacaatttatacgggactttttatcgcagttccggcactgcttctgcaccgcaggttaaaagatgaaatatttagtgtacggtttttcttttatatcgtattaggtcatttctatctgatcaatctggtattatttcttcagctgcttcatatttcaggcagatttacgctgattttgggcagtgcacttccagtcgttatatccttggtacatacgaaaagagtttcacctaaaaaaatcggacatatcataggaaacagaacatcccatgtgatccgggagacgcttggcattaaattacttcttctggagattgtacagtggattggcagaaaaattaagaaactgtgtggcagaatgtgtgggctgatcatcaggcattttgcagatggagtgctgtttgttgtatttactgcaacggttctggtaatgtatggaaccaatatgataaatacatacggttattgtgcatccgatataccggtacacaattactggatcaatgcgatggggcagaatgatgtgtttgtagctggaatttatccatttggattccactgcgtaatttattatatccatacggtaacagggattgaaacgtatgtgctgctccggcttttttatgtggtgcaggtcttatatatccattatgcacttctggcatttttgaaagcgtgctgcaggacatcgtattgcgcatggggagctgtatttgtctatgtacttgctgcattttttaacaggaatacttactcgcgttattacagttcgctgcctcaggaatttggcatgatatttatcctgcccggcatttattttatgtatgcctttttaaaacagcggaagatagaagtgaatcaatgcaaaaaggaaagaaacgctgccggattaaaaacctggaaatgcaaaagtacccgttatcttatgggatttattgcaggatttggacttacgctgatcgtacatttttatgatactatggtagcagggttgttctgtatcggtattgcaggaggatacctgttgcgtattttcaaaaaggagtattttttcagggttcttgcgactggtcttttaagtatcttcttggcagtgtttccgatgggaattgcctttttacagggtacgcctttacagggatcgctgggctggggactcaatgtaattaatggcagcaataatacgggtgctgaggaggaagatgaagcagatatccctggcagtgaaaaggaagaaataaatacaaatacacagagtgtgacggatcagagcatgacggaaagtacggatactgccgggagcatgacggatcagacaatgtcagaaaatggtgtggaaaatgcacagatgacagaagggacgcaggtaaaaacaacaaggtttggtatgctggtggaaaagatacgtttccggattacggatattacccaaaacggattggattatctgtggacaggagtgcacaatgttgtaatgcttcaggcaagcgtgccatggatgttgtttatttttgggtgcgagggattctgcctgatcggtggactattgtttacgctcattggaaaacatgattatggatcaatgctgatgtccgcaggatttggtctgctgcttttgatgatgtttctttctgcatggcgttttggactgccacatatcatggatgcaagccggtgcagtatctacgtcgcttatatgataccggtagcgatcggacttggaatggacggtatggtaacattggtctttggattttttaagcggaatatctggatgaatcttgtttcactgatgacgtcagcggcacttgttgcgacacttgtcaatggaaatcagatccgtacaccgtcaatattgacggcactgcagtcgaatgcggcgattacctgtctggcaaatataaagcgggagaacgaaaagtataaatatacaatctgttctgcgaatgatgaactgcgaatgatggaagattatgcacgtcatgaggaaacaattacatttttacggagtatggaaggagatgcggtcaatggaaatctgacgctgccgacagaccgcgtatatttctttattgagaagataccacttgattataccgtggcatatgagggaagcggacagctcatttcagaagaaggagcaaaaaaaccgctgccaacagcaggagatatttcggtttatgaaggtgaaaaccgatggatcgtaatgtcaagaatgtattactgggcacaggcatttatggaactgtatggaaaagaaatgcaggtgtattatgaaacagatgattttatctgctatgtggtagaacagaatacctacagtttatatgatttttcaatcgattatggatataattgacggaaaaaataatggctgcaggatgagatggatttggaaaggaaaatgtgatggtatcccgaagaaattttgctgcaatcacgatcatgttaattattttactgtttatgtttcaatttacgggtgtgatgaaggataaattaagtaaatatgggatcaatgaatacaaggaaagtgccacaacggaactgacaaaacaggatatgtatctggcatccgggcagaatatacagaaaacagcaggtgtgctgtatattggaaacagtgaggcagtaaagaataccgtaaaatggtggtgtacatatagcaaacgtgaatttcagacagcggactcttttgatggtatcgtgtcggaagacagcaggctgacggatattttggttttagatggaacctgtctgaataccagggataatataaaggcggtcagtgatgcagccgaaaagggagtaaatgttatagtttcaggactgccggatgcagaggaaattgagaagaacgaccgtttgagaaagctgcttggaatccgatatgtggaacagaatgaagtgacacttgacggcatacacttgtttgaaggatttctgctcggcggggaagtgatctatcaggcaaaagatgaggaagaagagaaaaatcaggatatggatcttaaaattccatggtatgtgacgggggagggcacaaaaagttatatggtcggaatactctcagatgttcggccggacagcggaagacagcctgccattatatggagaaacggactggaaaatgcctgtgtgttttgcattaatggaaattatttaaaggataattccggtattggcattctggatgcaatgatggcagaatcgtattcgtttgagatttacccggtgatcaatgtacagaatcttgtgattgcaaattatcctggatttgcgtcggaaaatgaaaataaaatggaaaaaatatacagtcagtcacaaaaggcattatttcgagaaattatctggccgtcgctggtcgcaattgaacgaaagatcgatgcaaaactgacctgtatgatgacaccgcagtttgattatggagatgaaaatgagccacgggagggagaagtggcatattatctgaaattattgaaagaagaatacggggaggcaggactttcatccggcaatgtatctggaaccgggttgtcggaaaaaatggagaaagacgaaacgttttggaaaaaagaggcaccagattattgttttcagtcattatacctgcaaaatgaagacgaactgggggatgctttggaatgcgaggaacttgatggaataaggacgattgtaaccagggaatcacagaccagcgacgaaccgatcgtttcctttgcaggggaagaggtgacactgcagcgtgctaccggagatggtgtgaatcatacatttatggatgatctcagacagagatgtatccagaccgcattggggtattcgaatacggtatgggatctgcttgcagcagcatatccggagaaaaaggatgatgcgtgggagatcctttcgaaggaagcagcgtctaatatctgtacttatcagaaaccgtttacggcatttgatgagacaacgatctcaaagagcgatcagaggataaggagatttctggcactttcttattcagcagaatctgaagataatatgatttccctgcatgttgacggattagaagaggaagcatggtttttactgcatacgggaacacgcgaagcagaggatatacagggaggaagtttttctgtagtggaggatggtgtttacctgatctgtgcagaagaggatgaggtaaaaatccggttgagtgaggaagaagaaaagcaattgttttattacgaggattgaaaatgaaagtatgtattgtagcagagggatgttatccttatgtggtgggcggcgtttccagttggatcaacagtatgataaaagcttttcccgacatagaattcgtggtgcttgcgattgtggcaaaccgttcatacagaggaaaatttgtttatgaactgccggaaaatgtgtcggaagtttatgagctttatctggaagattatgactgggtagagcaggaaaaaaataaaaaactgcatctgcgtcagaatgaatatgaggcactgcggtcattacttttaaaccgggatgttgagtgggatacgttgtttacgttgtttgaaaagaaaaatttttcattgaacgcgcttttgatgggagaagattttttaaatgctgtgcgggaatgttatcagctcagatatccacaggttgttttttctgatttcctctggaccatgcgttccatttatctgccactgtttctgaccttgaaaatggaactgcccgaggcggatctttatcactgtgttgcgaccggatatgcgggagtgatcggaagcatggcaaaaaaaagatatggatgcggactaatggtttcggagcatggaatttataccagggagcgggaggaggagctgatccgtgcaaagtgggtaggcggtatctataaaaatatctggatcgaacagtttaaaaaaatgtccctgctcgcataccggtatgcagatcaggtaacctgtctttacaagcatgccatggaacttcagatcgaactcggatgtccggcagaaaaaataaagatcacaccgaacggtattgatgatcagagatttgtcagatgccttgaagaagagagaaaagaagatgacaccatcaatatcggagcggtgttaagaattgcgccgatcaaggatgtcaaaacgatgataagagcctttgcttatgccaagaaagaggcaccaaaactcgcattgtggatcatgggaccatccgatgaggaaaaagaatatgccaaagaatgttttgaactggtggatcttcttggcgtggaggatgtcatctttaccggaaaagtcgatgtgacagaatatcttgggaagatggatatgaccatactcacaagcatcagtgagggacagccattgacgatcttagagagttttgcggcaaaaaaaccggtgattgcaacggatgtaggcaactgcagggggctgatctacggggaaggcgattcatttggggaagcagggatcattacacatatcatgaatgtggaggagattgcggcagcgatggtagatctggcatgccacagagaaaagaggattggcatgggaaaaaacggataccggagactaaagagccggtatcttgtggaggatatgaaagaaacataccggcagatttaccggcaatttggggatgaaggcagagtgcagggaaagaaaggggatgtgtgatctatggcaggaataggcgtaaaacttcagaaaatttatgacaggcgcacgatccttgcaaatctggcaggattcggttacagtaccatggtcacgatcgcccccatgtttgtcgtgatcggaaatgtgatgttaatgagccattttcttggatacgagacagtagggtatgcgagaagaggattattttcaggcacggtactttatatttttatattttccctgctggttgcggcaccgtttaatgctgtattatcgagatatatgtccgatattatttatgaggaaaagtacgaagatatcctgccatgttatgatgtcggattatttttaaatatttgtttcgggtgtctgtttgcaatcccgttctgtatcagggagtatctgaaggggcaggtggatctggtgtttgtgtttaccgggttttgcggctttatatcgcttcttctggtattttattccatgctgtatctgtcgatctgcaaggactatcagaaaatatcattatttttcctgatgggtatggcagcggcatttgggcttgcgtggctgctcgtgaaagtgtttcacagggacatcatatacagcatgcttctttcacttacgatcggatttttcctgacggcggcgatatcagcggcaacgattaagagttattttaaaaggaacagccgccagtaccgcaaggtgcttcattatttcaaaatttactggcaccttattgcgacaaacctattgtatacgttaggattgtatatacataattttatattctggacgacggacttaaagatgacggtggcacatacgtttgtctatgcgcctgcatatgatatggcgacctgtctggcaatgtttacgaatctttcgtcgaccatcatttttatcagccgcgtggaaatgcattttcatgggaggtacaaggcatattcggaggctgttatcggtggcagatgggaagatatcaataatgcaaaaaacagaatgttccgccagcttgcatctgaacttatgaatcttgtgagaatccagtttattgtctcggtcgtgctttatctgctctgtgtgatatttttgccgggaatgggcttttcaggacttgtgatgcagatttatccgtgtcttgcagccggttactttattctttttttgctgtatgcggaactgatttttctgtattattttaatgatatgacaggagcacttttaacggcggtctgcttttgtctgggtacgttttttggaacgctgttttcaaaacagcttcctgatatctggtatggtgcaggacttgtcatgggaagtttctttggctttaccgtcggatatttcaggcttcgctgggtggaacgccatatggatgtacatattttctgccagggtgaattgtttaagataaagcggggaagaaaaccttccgcaaaaagttatgacagaaaagaggggataaaagcatgatattgaaaatgatgttgattgttgttggaatttttctgctcattttggatctttttatgtatgcaaggcagaaactggcggatgggatcggacttggctgggcgattgtttctgcgacatttcttgtatctggcattgcggtaagtacggatgcagccacatacctgtggaatggagcaaaaagtgtggtactgtttgcatttgctgtgtttgttgttataatcctgtttttatttaaaatcagtatggcagtgtctgttgtggtggtaaaaaaccaggaactggcgatgcaggtatcactgctcaatcaggaaaatgaaagaatattgcaggaactgaaggggcttgtggatgaaaaagaaaatattgttcgtgattaatacattaggcggagccggtgctgagatggcacttttagaactgcttgaaaaactggaaaaggaaaatgaaaagacaaaagatgtgcagtatgagatctctctttatgttctgatggggcagggggaactggtgaaaaaactgcccaaagaggtcctgctgaaaaataaatcttatcagcctctgtcggttttgcagaaagagggaagacattttatgtataggacgattttaaagaccatgttcgtccggggtaccgtattctgtctgctgccatatcttttgtcatcacttgcggatatgttaaaacggcggaaggtgctgccggataagctgctctggcgtgtgctctccgatggaggagaacgttttgcggaagaatatgatcttgcagttgcctatttagagggtggatctgcatattacgttgcagatcatgtccgtgcaaagaaaaaggcggcattcatacatattgattacacaaaggcaggctataccagaaagttagaccgtgactgctatctgaaatacgacgccattttcccaatcggggaggatgtaaagcagcagtttttaaaagtctacccggaatgtgccggccggacaaaggtttttcataatattatcgatacagagaaaataaaaacaaaagcatcgctgcccggcggattttctgatgattttgatggcatcaggcttcttacagtcggccggctgacggaacagaaatcttacccgacagcaatcagggcgatgaaaaaaatcaaggagaaacataaaaatgtccgctggtatgttctcggagaaggaccggaacgaaagagactcgaacatctgatcgattctttgggattacaggaggattttattctgtcaggttctgtggaaaatccgtatccgtattacaaaagtgcagatatctatgtacatgcgaccggatttgaaggaaaaagtattgcaatacaggaggcgcagacgcttggacttccaatcattgcatcggagagtaaccgggaacagatcgaaaatggcgtggatggtattttatgcagattagaaccggaagcggttagtgaagctgtatgcaggatgatggaagatgagaaactgagaaaccggtatcgggaggcatctcttaagaaaaatgttgtctatgagaaagatatggagctgcttaccggtttactgtttcgctgacagaaaaaatacatacagcaaaaaagaggagtgggatggaaatgaaaaagcaaaaagagttattgattattatgcctgcttataatgaggaaaagaatattgaagcggtgctttatgagctggaaaagccggaaatttcatccattgcggatattcttgttatgaacgatgcatcttctgattcaacaaactgggtggtgaaggcacatggccatacattagttacgcatgtgtttaaccttggttatggcagtgcactgcagcttggatataaatatgcaatacgaagaaaatacaaatatgtgatacagatggatgcggatgggcagcatgatgtctgcaatattccaaagatttatgagagactccggcagaaggatgcagatggaagatatccggatatcgtgcttggatcgaggtttatggaggggagttctgattttccggtttccgtgaccaaaaaactggcatatgcgctgttccgccagatgatcaaaatgacgacgggacgtcatatctgtgatccgacgacaggactccagggacttagccggaaggcatttttgtactattctaaatataagcattttgatgataagtatccggatgcaaatatgatcattcagatgctgctgcttggatttaaagtggaagagataccggcagtcatgcacaacaggcagacgggagtcagtatgcattccggactgaaaccggttatttatatgtttcgcatggtgttttcgattatcggagtggtattccgtgtaaaagtattaaaaattgatgcgggggcggggaacgaagatgtttttctggaagaacagaaataaaaaacattttacagtcagatttccggaggagagcagggaagtatgtacaaatccgggcagaggatggtaccatatttatacatttacactggataaaagagagaaagatggacttttatatcagccttactgggatgatgaaacattagtgctggtacggtttgatatcggggcatttcgtggaatgagcctttcagaagaggcactggaatatgcagatgaaattttaaaatgttttcacagccggggaaaagaaatcattctgcgcgttttgtatgatacacaggggaaaggaatggaacgggaaccgacattgttctccattgttttaactcatatgaggcagcttggagctgttgtgcgtgcatatgagagcgatatccttatcacgcaggggttatttatcggtaactggggagaaatgcatggatcaaagtttttagatcaggaatacatccggaaactctatgctgcatggaggaaggcaattggacccgacatcagaatcgcactcaggaaaccgtctttttgccgtatggcagtgacaaatgagaatgacaaagcagtaccaggggtatttgatgatgcgatttttggctcagaaaatcacatgggaacttttggagtgaaacgtcgtgcggatagtgcatggacagaggactggtgcattgcagatgaaatcggttatatgcaggaaacctgtggtcagatcccgtttggaggcgaggtgctttccggtcagaatcctgctgcaaaggaaatgctgcgggcattgtgtgatttgcgggtttcatatttgaacagtatccatgaagagcaggttctgaaccggtggaagcagatggaatatggggaatggggcagtttctaccagtatatcggtgcacatctggggtatcgttttgtggcagggagtgcagtattttatacggacaggattgaggtggagatagccaatacaggattttcaaatatctgtgataaaacagaacttgcacttgtaagagagaatgaggatggaacggaagaagtgtatcaggcagattatgatcttcggatgctggcaggacaggagacggtaaaaatcgtatttctgctgtcaggactgcaggatgagaagaaggacagatattttctgaaactgacaagatgcagaggaaacgtggcaatccgttttgcaaatgaagggggagaagaacggttgtatctcagataaaaagggagcatggaaaaacatgacgaaagaaacagataagatcagtgtgatcgtgccggtatataatgtgaaaaactatttagaagactgcgtgcaaagtattacacaccagacgtatccggatctggagatccttctgatcgatgatggttccgatgatggttccggggagatctgtgacagacttcagatgacggatgcacggatcagggtatttcacgaaaaacataagggtgtatccggtgcaagaaataaaggactgaaagaggcggctggcgcatatatcgcatttgttgattcggatgatgtattagaaccggatatgtatacctatctgatccggcttttaaaaacacatgaagcacagattgctgcatgctccggttggtataaatatgatgccggtgtggggaaaaaatttgaaagtccggcagatgtggtctgcatgaacggaagagaagcgcttggtgttttgcatgagagaagctacctgcgtgcctatgtctggaacaaattgtttcagcgggaggtccttgacggaattcgtttttcaacggaattgtcgtttgcggaagattacgagatgttctgccgggtattagaacagtgtgacacgattgtgtgcggaacaaaagcggagtattactatatgcagagaaaatccggcatatgtaatcgtggatacgacgggatataccagaaggcaatgatgatgtttgaggattactgcaatgtgtattcccgcagatatccccaatataaaaaattatttgagaaccattatctgtttgacctgatggggatggctgccgcaatgagccggaatggcaattatgttgctgcagactgcagaaaaataaaaaaatacgtcaggcagaaactgccacaatatcttacagataaaaaggtttctctttacttaaagggaagtgcctgtgtggtcagtgtcagtgtgagagcgtttggtgcggtctatcggatgctgcactgcgcagaatttgaataatctgatagaaactctgagaaaaatgaaagaaaggtgagaacacatatggagaagagcagaacagaatattcgaccatgaataccgtggttgccatgatctcaaggattgctgcgattctgatggggtttgtgacacgtgtggtatttacacacacactcagtgagagttatgtcggaatcaatggacttttcacggatatcttaaatgtactctcactgacagagcttggtgtggaaacggcgatcagttatgcactctatcgtccaatcgcacagggagatatcagaaaacagcagatcctgatgcggatgtttaggacattttatcgtatcacggcaggctgtgtggtagtgttaggattgtcgatcattcccttttttgatgttctcatgaaaaaccggccggatgttgatcatctgatgctgatttattttttatatctggcaaattcagtcgtttcttatctgctggtatataaacgtaccctgatcgaagtgcatcagttaaactatattgttcttttataccagacggcatttctgatcttacaggatatctgtcagatcgtcattttatttacgacacacaactttatttttttcctgagtatttatattgtatgtacactgctctctaatatctgcatttcccgaaaggcggatcgtatgtatccgtacctgaaagagaaaacgaaagagcagctgccggaggatgaaagaaaagatatattccgcaatataaaagccatgctgatgcataaacttggaaatgtggtggtcaataataccgataatctgctgatttcttcttttgtgggcgtcatcagtgttggtatttattctaattatttccttctgatcggctcagtcagacaggtgttagaccagatttttcagggaatcaccgcaagtgttggtaatctgggagctacagaagatgagggcagggtaaaaagcatttttgagactgctttttttatcggaaactggctttacggggcggcggcgatctgcttgtatgaacttttaaatccgtttgtggagctcgctttcggaaagcagtatctgtttgatatgccggtggtcttaatcttatgtattaacttttatatcaatggaacgagaaaagcggtgctgacattccgggactcgcttggattgttctggtttgaccggtataaagcactggtggaagcggtgttaaaccttgctatttcactgattctggtatggaaatttggaacattcggagtgtttgccggaacatttctctctaccatgctcacctctgtatgggtggaaccatatgtgctgtacagacacagactgcatgcgaaggtggctccgttttttgtccgctatgtgatctatacagcggtaaccggtgtgatctggtatggaacagaccggctttgcttatttgcggatggtggaagggtgatcgtatttttaaagagatttttcatatgtgctgtggtgccgagccttgtgatgcttctttgcttttgccacacaaaagaatttggaattgtaaagagaaaagcacttgctatatggaaaaagaggtggacagatggaagaaaaaaataaagagaaagcacttatattgtgcagtcttttggatgcagcactacatgcagaaccgcatgtagaaaatcaggcagctttaaagcagaaatgggaacgattaaaacaacagaaaacggactgggaaagtattctttccatagcggattgtcatcgtgtgctgccgcttttgtatgacgtattggaaaatattctgccagaggacggggcagactggaaaagagtgcaggagagaagtacgcagactgtatggcagtcctaccgtctgctttttatgagccggtatgtgacaggtcttttgaaagatgcgggaattgatacgatattattaaagggaagcggcgtagcaggactttatccggtgccggaactgcgcaagtcgggggatgttgatcttttagttgagaacggaaagatggcgcaggaggctggcagatgtctgcaggtgcatggatttgtggcagagagcggacatcaggaaaatcaccatcttacttatatgagcccggaaggaatccgtttagagctgcacagtgcattagtggagccgtttgattcaacggaagtgaacacttttttggaaaaatgtcagaaagatttttttgaaaacagggttactgaaaatgtcatgggagtggattttttcctggcctcgccatcatatcaggcattttatctgttattacatatgctgcagcattttttgcgttccggatttggcttaaaacttctttgcgactgggttgtattctgggaacatggatgtacggcagaggaggaagcaaaatttttaacactggtcagagaatgcggcatcttaaattttacatgtgtggttacgttattttgtgtcagatatctgggattatcagaaaacaaggtgcagtttctggaaaaggcaggagaagccggggcaatgaaagaggaggcttacctggaagagttttttacagagatcatggaagccgaggaatttggtgaggcagattcaaaacgcatggtagccatgaggggaacaggatggattgattatatcagggagtttcatcatcagatgcacctaagccatccgaaagccgggcagtataaaatactttatcccattctgtgggtaaggacatttttcggttttgtataccgcaaccggaaacttcgtggaatatcaagtattgccatcttaaaaaatgcaaagaaacgaagccggctggtaacgaagatgaagctgtttcaaaagaataaatacgaggaataagatgagaaaaaaaatactgtttttcattttgtttgtgttaatgatcaccggaattgctgtggggatacatgattattttcactggcaggtaatgcttgccacggagacttttacggaatctacggagaaaatctggaatccgaatcgtggattttatcatatttatggtttcctgatttcggatgaaccggcggatatgagtgagcagttagacaggcagatgcaaaaagatacagatcatgcccttgccatggcgcagatcaatttaagggaataccgggacaaagaaatatcaaaggaaggtctgcagaatatcgaaagactttttcaggcgatgtctgtgacaaaagagcactggatcgtacggtttttgtatgactggaatggggaaaatgagaagtatgaaccggagagtattgattttgtgataaaacatatgcagcaggttggaggaatattaacagaatacagtgactctgtttttacattacaggggctctttgtcggcaactggggggaactcaatgggacaaagtatgcagatcagcagtctttacagcagcttgcaaaacagcttgtaaaatcgacggatagccagatgtatcttgcagtgcggacaccggtacagtggcggaagatcctggaaagtgcagatgcagacttgcaggaagatcgtaaaaatccgctgtatgacaggcttggactgttcaatgacggaatgttaggaagcggcaatgactgtggtacttatggtgaaaaaagtgccgcagaggcaggtacagatcaggcgtggaaccgcatggaagaacttgcttttcaggaaaaattgtgttcccgtgtgccaaatggcggggaggtcatcatagacaatgaatataatgatttagagtgcgctattgcggatttaaaaaccatgcatgtgacttatctgaatcaggactatgatgcggcagtattagaaaagtgggcgtcatctgcggtacagacatcggactgctttgacgggatggaaggactttcgtatatagagaggcatttaggttaccgtctggtgttgtcggatgtttttatgcagcatgatttctgggaagatacgacagagataaaagtgtcacttaagaatgtcggatttgcaccggtctataaagagtgtgaaccggtattccttgtgaaagatgaaaccggtcagacgatttatgagggaatcccctcaggggatattgcgtcacttgccgggggaaatgaagcagaaaaaaaggagaactttttaacaaatataccgcttcggggtgtaaaggctggatgttacagtgtatattttgcggtgcgggatacggcgaccggcagttttatcacattcgcaaatgatcagaaaatagaacaggaaggatataagatcggaaccattttactggaatcgtaaaatggttccgattttgtttagaaataatttcgaaaatatttaagaaaagctgtccgttctcttaagagttttcccgtaagattatctgtgaaaggaaagggagggaagcttaggatggagaacagagaaaaatatctgagttttgtggttccatgttacaactctgaaagttatatggcgaggtgtatcgaatcgcttctgccgggcggagaagatgtggagatcattattatagatgacggttcaaaggataagacaggggagatcgcggatgcatatcaaaaacaatatccggatcttgtgaaagtgatacataaggagaacggtggacacggttccggtgtcaatgcgggacttgcctgcgcaaggggtgtttattttaaggtggtggactccgatgactggctggacggaactgcctatcagaaacttttagaaaaaatcagatattactgcaaagaggcgggagggggcgaagaaaagccggatctgtttgtctgcaactatgtatacaatcatctggagcagcagataacgcgcagtatgggatacgggaatgtgtttcctgcagaaaaaatctgcccctggagtgagaccgggcatttcctgccgtcccagtatctggtcatgcatgccttggtttaccgcacggaaatattgcggcagtcgggaattgttctgccggagcatacgttttatgtggacaatctgtttgcctactgcccgctgccgtatgtcagaaatattttttatatggatattgatctgtaccagtattatcttggcagggatgaccagtctgtcaacgagcagatgttaaaaaagcggatcgaccagcagatgaaagtgaccagaatggtgatcgcgggggcagatcttacaaaaataaaagagaaggaaccaaaactggcatcgtatatgtaccgcaatatctcgatcatgatggcgatctcatcgattcacctgcttttgatcggaaatgaggaagcactggaaaagcgaaagaatctgtggggagagatcaaaacatccaatccgaaactgtactataaattgaaatacgcgagtctgagcggatggacggatctgcccggagcagttggaaggcggctgaccattggcggttaccgtcttgcgaatgcagtttacagatttcagtaaaatgcaaaaaatagaaaaaacaggaaggaaccaaagaatatggcacacatatatattgcattagtggacacaccaggtttttttgcatctctgatcagacattatctgggacagaaatacgttcatgtggtactgtcacttgatgaacagttgtcggaagcttacagttttggaagaagaaatccgtatatcccgttaattgcaggatttgagcgcgagtggagcagacagatcgcgggggcgtttccgacggctgagtaccggatctgtgaactggactgcaccggtgaacagaaagaagcgatccgtgaacgcctgcataaggattacaaaaacagattccatatgcactatgcggctgctggactgttggccctgctctgccaccggaaattttacctgaaaaaccagtatacatgttcatcttatctggcagaagtattaggggaacaggggattttcatatcggagaaacatttttcactggtcaccccgaaggatgtctgtgaatacaaaaactgccgcgtggtgtttgagggacgtctttcagatctgatcgtgcgggaagaacaggcggttgcttatgaaacgtaagagtacagaccgaaaatatggaaaagaattttttttgtttcttgcgatcatgatgcttacatttggtgtagtcctgcgtggacaaaatttttcacaactgaaatctacactaatcagaatgaagccggtatatgtcggggcggcattgttcctttcagtattttttgttgctgcggaaggctgtatgatctgttttctgcttcgaagtgtcgggatcatagtacatgtgcgtcagtgtgttggatattcatttgccgggttctttttttccgggatcacgccgtctgcatcgggaggacagcccatgcagctttattatatgaaaagggacggtattcctctgccggagggaaccgcggtgctgatggctgttgcgacagcttataaatttgtgctggcggtcgtcggaatgatgatcctgttattctggcagaaactactgaaagagcatcttggcggatattttttctggtatatcgtgggactttccttaaatgttctgctcgtaattcttcttttatttgtcatgttaagaccggttctgatccgtcatctggccgaaaaaataattgtcatggcacaaaaatgcggcatgaaaataccaaaagagaaatggttggaaaaactggacggatttctggatgggtaccgtggaacggttctctttttccgggatcacaaagaaaaaatactgattttaattgtgatgacatttgttcagagaagcagtgcttttctgctgacttttctggtgtatctgggatttggactgtctggaacagcgatgtaccagatcctgctgcttcaggcagccatctatgttgcggtggatatgcttccggtaccgggagcacagggaatcacggaggcgatgtatggaaaggtatttctaccggtattttcaggacagtatctggttcctgcaatgtgcgtgacaaggggagtggggttttacctgatgctggttattggagcattgtgggttttaaaaattcattataaaaaaatcggttcagggcgaaaaaaggcgtgtactaatgcttgacagcacaaaaagatatggttaaaatagatagaaataagtgaaaagaacaggggagagggaagttcgcatgaaagagtatatgaaaccagtgttacttaccagtgatgaacttgcagaaggggtatatttagcaagtggcgacggaagcggttgttatacgacaacagcatatatccatcagacaccgcagaccggaagaggtgattaccgtattcaggtgaatgccgtgcataatgcggatcatactaaagaagcacagcagttaaatatctcatttaatcagccggttacttatgtttccggtggcagggggtgcacatcaggagacggaacaagttctctttgtgtttctttgggatatcatcagaatccgaacgataatatcggttttggtgatctggttgtaaaatcggatccgggacttgcaatctcaagtgtgagtgttacggactaaggggcaggcgcaataagaaaagataacaaatgaactgagaaataaaccagaaatgaacagatatgagagaccaatgatcatcgcatatcaagatacggcagaaggtgtgtatcttgcaagcggtggagcggctgataattcagatacggcaaataatataaagtgtgatagccagtatatgaatggtaactggcaggcaccggattattcaggctggaatggaggcaccagaggatacagacagcagttcggatgtctgggatgtccggcatatacagctacagcctgcggactcgagacgcattatgtggattcgggatatgctggaagttacaataccgataatggaaaccgcaagccatcctgggaaaagaaaggatatggaccggatgatacagtaactgactgggcgatgtaggatcatatggagttcagatggggttatcatatggtatgtgaggaagagattgcctgacatatacatgtggtaacctcttttttcgtggttcatatttgttataataactggaaatcggctagaatggggaaatattatgttagacagtctgaaattttatcataaaaggatcaaagagggtgtattaaaagatatgtggcgggagaccgtctggatctatgagtatgcgagaaagtactggaaacagatgattttttacacgctgcttggtctgtctggaacagttgtttcactgatttcaagtctgatttcaagggatatggtcgatattatcaccggaaagcaggcggggcttttggtgcgtacgttctgtctgtatatcgggttttccatagggaatatgctgatctcacaggtgaccagttatttttccaataagatcagtatcagtgtggacaatgatatcaaggcagatatttttgataaaatgttagtgacggatcttgaggcaatccagaaatatcacacgggagatctcctgacacgctggaattcggatgcctcaaacatttcaaatggtattttaagctggattccgaatctgatcatatatactgtgcggtttatcagtacgtttgcgcttgtcttttacaatgatccgatgtttgcacttcttgcgatgcttggcatgccggtcagtatgctgatgtcgaggcggattttaaggcgaatgaaaggaaataatgagaaaagcgcagctatgaatgcaaagatgtccggatttaaccaggaggcattttcgaatatccagacgatcaaggcttttgatctggtgcggctctacggggaacgtctgcgaggactgcaaaaagaatatcttggtatgaagctggagtttcagaaaatgtccatggcaacctcgatcctgttatcgatcgtcgggcttgcggtgtcatacagctgttatggatttggtatttaccgcgtctggagtggtgcgatctcctacggtacgatgacgatgtttttatcattgtccggctcactgacaggaacgctgaatcagcttgtgtcactggtaccgacggcgatttcgctgaccacatctgctggaaggctgatggatatccttggcatgccaaaagaggactattcggatgcagagcatgcggagaaattttatgaagagaaccgggagaacggcatcagtctttgcatttctaagatgtcttatacttatcacaatggaacaaaggtgtttatgcgggcggactttgaggcacatccacatgagattgttgcgttagtcggaccttccggtgaaggaaaaacaacgcttttgcgcattatgctcgccctgctgcatatacaaagcggggatgaagatctggtgggagcaaaaacaggggaagtgcttacaatcacaccggcagcacgccgtctgttctcttatgtgccacagggaaatacaatgttttccggcacgattgcggaaaatatgcggaatgtcagaccggatgctacggatgaggagatcaaagaagtactgatagtatcctgtgcctgggagtttgtacagaaactgccagatgggatatatagtaaagtcggagagcggggggtcggattctcagaaggacaggcacagaggctttcaatcgcaagggcattgcttcgccgtgcgccgatcctgcttttggatgaggcaacaagtgcacttgatgttgcaaccgagcgcagggttttgaaaaatatcatgcagacaaatgaaccgcgcacctgtatcgtgaccacacaccgcccaacggtattgtcggtgtgcaggagggtgtatggaatccgggaacagaggtgtgttgtgctgaccgcagaggaagtacagaaaatgatggatgagttttgaaagaaagcgtcttatatggactgatcaatggcagctttcatgacggctgcagcttcgggattttttgtacaattcagccggaaaatttttgtcagcggggcaagtgtttctgcaaatgccagattttttaacagcaggtctttcgtccaggtcggggagatcatgcgctgcatcagaaaaagtgcctgttcatccggtgggagagagttcacccggttgaaaggagcctgttttaaaaacacgataccgccaagtggataggtggtggtggtgtatgtttcggacgtcccgcaccagggcagaccgtatagataaggcaggccgttcttgatgccaagtacatttaagtctccgtttaaaaccggagtatgataccggttcgcccagaggttcgcgtgtgtggatttgccggtgccggagctgccggaaaagagccaggcttttccctgataaaaaatagaaacggagtgcaggacaaaaagagcctgcttttgtgcggcaatcaggaaggcaaaacgcagtgcatgaaaaatattttctgcatgatctttattatcggcatcaacacagtagaggacggcggcagagccgtctttttttacgcgcatttcatggattccccagtgaatgccaaagacaaagcggtaggtgtcggtgacgtcaaagatggtaagttcagtggtgtggagcagaagtgtaccatctgcaagatgagacggtttcccggttattataaaaatgcgctgatcagccacagcagcttcgcaggagaaatctttaaaataggtatcaaatagatcgtccgggccaaaccatgaaaagcagagaccgccgatcttataatattttggagcacgatcgtcagaaaacagtgcaggaaacgtattgtcggtctgatcagaatgcggtgggaaattttctgccggcgcattgtaagagagcatgccaagctgctttaaagaggcaagatagctgtctaagtcagaggtaagctgagggagcatatcagcatctgtattgtagtaattcgccagcacagataagagcgtgcttttgtccgcacccagggagagtgtatcccataaaagtgcaccggagtcatttaggcgcagggagcgtgcatggtcggcaattttctgaccatagggcagaagatagggaatacctgcgattgttgtttttacgaatccatcagatgttttcatatcgttgtggttcctttccattacaaatgaattggaaatattatagcatttggacaggggaaatgctacaataattcaggatgataagctgtataaaagaggtttccgatgaaatatgatattgaacaattattagaagcgggagaggtcatacagatctatcccgaaggatacagtatgtatccgatgtttgtgccgggcagagatgccgcggtcataaaaaaagcggatgtgaaaaaaatccggcgcgcagatgttgtgctgtaccgcagaaaagggagcattctggttctgcaccgtgttgtaaaacgaaaaggcggtcagttttatatggcaggggataatcagacggaggtggaaggaccggtggaagaggatcagatcagagggattttgaccgcatttgtgcggaatggacgtcgtatcagcgtgaaaaatccagtttatgtgattttgtcaggattgtggctgatgtttctgccggtgagagggatattctggtcatttactgcatgggtgcgcaggaggagttgatttttttcgacgattatgctaaaatcagaaagttgcagtgacatcgagtgttcgagaccttccactcgtaaaacaaaactaaaggagaaatgaaaaatgagaaacaaaaaagtattatttatcgtgcaggctgcgctgattgcagctatctatgttgtgctgacttattttatcagtgcattcaatcttgcttccggggcaattcaggtccggatttccgaagcccttacaattttaccggtctttactccggcggccattccgggactttttatcggttgtctgctcagtaatctgcttaccggctgtatgccgcttgatgttgtttttggcagtcttgcaacgctgattggagcatgtgggacttatgcattaagaaaacacaaatggttagcaccgttaccgccgattgtggcaaacacggtcattgtaccgtttgtacttgcatatgtgtacatggcagaggggacgatcccattctttatgctgactgtcggaatcggcgaagtgatttcctgctatgtgttaggtatgatcttgtataaagtgttaaataattaccgcagtgtgatctttaaaaacgaagattagtgagggcagaaaaggagtactgattataagtgcagcttgtgatcagtactctttttttgtcaattttgatgaaccttcttctgatgtttgtgcaaaagtgtacagaagaaaccggaattttgaaagaattttgtgaaagaagtttcgcaaaaacaaaaaatatcaattttgaaggaaagtagattcagtatcgggtaaaatcgttgaaaaaaccggaaattcggggtataaaatttatatcacagaggatcccaaaggtgatgtgaaaggagtaagagaatggaagcgcagtttgagaatttgcgaagcaagctgattgtatcgtgtcaggcactagaagatgaacctttacattcatcatttattatggggcggatggccaaagccgcatatgagggtggagcagcaggaattcgggcaaatacggtagaagatattcttgagataagaaagaatgtttcacttccaatcatcggtattatcaaggaggtgtatgacaattcagaagtatatattacaccgaccttaaaagaggtagatgcattgatggagataaaaccagaaattattgcagtggatgcaacaaagcgcatcagaccagatggaacttatctgaaagaattttttgaaaaagtgaaagaaaaatatccggatcaaaaatttatggcagactgttcaacggtggaggaagcattatttgcagatgaaattggatttgattttattggaacaacacttgtgggatatacgccgtacagcgtaaatgacaaaattgaacagaatgattttgaaattatacgcaagatattaaaacaggtacatcatccggtaattgctgagggaaatatcgatgtgccgcagaaagccagacgagtggttgaacttggatgttatagtgtcgttgtgggtggggcgattacaagaccgcagctcatcacgaaaaagtttacaaatgcactgattgaaggaggagaataggtatgcagacgttacaggtaatagtaattttggcaatcttcttagcgggagttgctcttatgatgacaaaaaagatgccagcgattttagcacttccatgtatgggaattttaatcgcagtagtagcaggagttccatttatatcaagtgatgcagagacacagagtattacttcttatgtaattgcaggtggagcatcccgtcttgcgagcaccattattgttactgtatttggtgcaatttttgcaaaggtaattcagaaagagggaatttcagatgccattatccgtaaggcagcagagctggcaggggataagccggttatgatcgctttggcactgactgctgcaacggcactgatctttactgctatgagtggtgcaggtcctgttattatggtcgctcagattgcaattccgctgttactgtctgcgggaattgagccgatcgtggcagcaagtctcgtactttttggattaaacattggacttctttttaatgtatcgcagtaccagatttatgtagataccattggaatggatatggaggttattaaaacatcttccatcgtgatgggactgatctgtgcggttgtgacggttgcgtatattttaatcaatgtaaataaaaagacagtcagaagtacatgggcaatgaatgctggaaccaactctaaaaaggttaatccggttgccatgctgatgccgcttcttcctatcgtactggtatttttctttaagtggaatgcggagacaagcttggtggtagcaattattgtaacagcattaattacgaagccgtcttcaagtattcaggttctttcaagctccatggtagagggaattaaggatgtggcaggagtcatcggtctgatgattggtattggaattcttttaaatggagtggcagcacagaaaacatctgctctgatgcagccaatcattagtgtgattcttccatcaaacccgattatgtacattgtaatttttacagttctttctccactggctctgtatcgtggaccgttaaatatgtacggtcttggctctggtctcgcaaatattttcctgacagcaggaaaactgagtgcaccagcagttggtatggcacttcgtagtaccagcgtggtacagtgtgtatcagacccgacaaacacacagaatgtcatcgtagcagattatgcaaaagtcgatgttaatgatattttgaaatcaacacttccatacaccatggtaatggcacttggaatcttgatttacgcagcagtagcattattctaaacagtaaggatcattcaaggagggtatgtttcacatatggataacagaaaggtaaggatcggaatcgatgtcggaggaacatttacggatgccgtagtcgtagataatgagacctatgaggtcattgcaaaagaaaaagtgccgacgacacatcatgccgagcgcggtgtggcgcagggaatcattgaggcgatcaatacggtactcacaaaaaatggaatttctccggataatgttatatttatcgcacatggaaccacacaggcaaccaatgccctgttagagggagatgtggcacgtgttggtattgttggcatgggaagtggtatggaggcagaacgttcccgcaaggagacgacagtcggaaatatcgagctggcaccgggaaaatatttatatacagagcatgaatttatagatgcagcctcacttaccgatgaggctgtaaaagaggcaatcgatgcactgaaactgaaaaatgtggaggtgatcgtggcttcggagagttactctgttgataatccggaaaatgagcagaaagttattggcctggcggtaaaagaaggactggtcgctacaggtggacatgagatctcccagctttacggactgcaggcgaggacgaggacagcagcagtcaatgcggcattgatccccaaaatgatggagactgccaacatgacggaaaatgcggtaaaagattccggtattaaaaaaccgctgatgatcatgcgctgtgatggcggcgtcatgagtatcgatgaggtgcggaagagaccgattcttacgatgctatccggcctggcagcaggtgtggcaggagcactgatgtatgaaaaactgacagatggcattttccttgaggcaggtggaacatcgaccgatatttcagcgatcaaagatggcaaggttatgatcaaaaatgcacagatcgggggaagaaagttatatctgacttctttggatgtgcgtacacttggaattgccggaggcagtatgatcgtggtgcgtggaggtaagatcgcagatgtcggaccaagatccgcacatatcgcagagaaagagtatgaggtctttactgacaccgataagatgaagaatccaaagatagagctgatcgcaccgcgcgaggacgatacatcggattatgcggttgttgcctgtgcaaatggcgagagctatgcgcttacactggcaggtgccgcaaatattctgggttatgtgccggcggatgactatgctgccggaaatgtggaatcagcgaagatcgcatggggggcattggcatctatgacggggagcacggtggaagaactgtgccgtcaggcaatggatattgcgatgacgaaagttggcgagattgtaaaacaactgattgcagattataatctgaatccgaacctgatctgtctggtcggtggtggtggttcggcgtcggttgtcgtaccatatttgggagaaaaaatgggaatccggcataagattgcggaaaatgcaccgtacatttctacgatcggtgtctctctggcacttgtgcgtgagcagatggagcgaaatgttgcaaaccctacggatgaggatatccgtaaaatccgccatgatattatggaagtgatcaccagggcaggcgcagatgcagcaacggttgatatttcgattgaaatcgacagccagaaaaatattttaagagcgatcgcaacaggagcgacagagctgcgtaccaaggaccgcaatgcaaagaccatctcggaggaagaacagaagcagattttagcggatgccgagaagacaacgacagatatggttgagcgggcagcagcggcaggaagatggcatgcgtactatgtaaatgtggcaaaaggcggctttctaggattatttaaatcaaagaaaaaactggtgcgcatgatcgatgaggaaggcgttatacgtcttcagaaaaatattgcaaaaattggagtatttcacaaagatcagattggaacagatttcatggaatttgtggacagtatgacacagtatacggacgctggtgcgacattgccgaaaacgtacttattttttggtcagaaaatgagtgatttaagtggtgtcttaaacaaagagcagctgctcggtctagctgagatggaactggaatttgttgaggatgatcaggaaattattgcagtcgctgcaaaggattgagacaatgtatgatcttaaatcaataacagaagaacaatatgcgatgatggaactgatgaatgaccggctggcaccctgtatcccgaaggagaaatgcagggattatgtgacggaagcgatcgcatgcggacaggaggcatttgagcagtataaagatgcggatattatggcaatactggtgaattccggtgttgccattctgcaggatgaacgggaatttacacatcatgggcaaaactatgaggtatgggcgcagatcacctgtggcgggaaggaaaaaaagattgaactttttatgccggatctgcgcagaaagcaacagattctgaaggaaaacggagtggagacaggggaacagtggctcataaagctgcatcttgcgcatgagttttatcattttctggaatttacaacgcttgggaaagtcggtatgcggcttgatcctgtgcagaaaaagacgatttttggtacggtgcaaagaccgcttacaacagtcagcgagatcgctgcacacagttttgcgggaagatatatgaagagtgagattcttccacagatgacagattatatggtaatgctgtcggaaggcatattgccggaagagacattgcgggaacggatgcaggaagcagaagaacgattacggaaaaatgagggtggaaaacagaatgtatcaatgggataaaataaaggtgattggaaactacgacacagttgtagttggcggtggcactgccggggcggcagcgggaatccgtgcggcaaaagaaggaaacagggttttgatcgtggaaaaaagccttgcacttggcggggcggctgtcaatgcgctggtgaatccgatgatggagtcttttgttgaacatggagagatatttcatgagattgagagacgcctgaaagaaaaaggggtcactaccagagatggcattatggaatatgtacattccacagcagaggcaaaagcacttgtgttagaggagatgtttctggaatatggaggcgagatattatatgatgcagtgctgaccgactgtcaggtaaaagatcagaaaattgaaaagatttttgtgacgactgaggaaggtgtatatgcgatagaggcagaacaatttgttgacgccaccggggatgcggttctttcaagaatggcgggagtagcatataccgccggggatgagaacggaaataaccagatgacatcgctgcgttttgagatgggtggcattgatgtcgaaaaataccgggcatactgtttgtctttaaatgatgaattttctccgctggtaaaaggatacttttttgaatctgcaatggtgcggaataagaattttaaacttgaaccggtttttcgaaaaggggtggaacttggatatctgaaagaggaagatctcgtttactaccagtgtttttccattccagatcagccgggttgtatgacatttaactgtccgcatatcagtagtatgaagaagaataccgatgtgtgggcacggagcagagctgtaacggagggacatcagatgatcttccggctggtttcatttttaaaggcatgtatgccgggatttgaacatgcgtatctgattcgggaagcgtcagcactcggtgtccgggaatcctaccgtattgtcggaaaatatgtgctgagcgaagacgattacataaagagggcaagatttgaagatgcagtggcaaaaggagactggtatattgatgtacactctgcaacgaaaggacttgtccatatggagaagtatcagaggggagaatactatgagattccataccggtgtcttatcaatgagcaggtcgacaatctgttaacaatcggcagatgtatttctacaacatttctggctcaggcgagtatccgtatccagccgacggtgattgatatgggagatgcggcaggaaaggcatgtgcggatgcacatacaaagcagactgcactgagtaagtttgaggggaaaaatttgatataatggatactgttgtcctcacagattgtttgtgttttgcgtgaaaaaagaatataatgggaacattattgtaataaaacaggaacaggtgatggaaccttgaagaatagcagatatataatttttaaccagaatgagacgaaaggccagattgaggctgcgcagtcggatatgacgcaggtagagcacacgattgccaattattttctaaataatgaggagctgacagatttttcatccaagcggatatcagcactgctctatgtatccgaggcaacattgtcacgctttgcaaaaaaatgtggatttaagggataccgtgaatttatttttgcatacgaaaaggacttaaaagaggaaaaaaatggaacagtcagtgagaaagatatcagtctgtttaccaagaaggtacagagcagttatcagaagctgctgcaggaaaattttaaattgcttgatgagaaccagatccgccggattgccggactgttaaatgtaagccggcgtgtgtttgtctatggaatgggaagttccggcaatgtcgcagaggaatttcagctccgttttatgaggatcggactggatgtgactgcggtaacagattcacagatgatacagatgagtgcagcactggttgaggagaggatgcttgtcattgcaatttctctcagtggaacgacgagagagattgtggaaagtatccgcatcgcaaaaagcagaaatgcaaaagtaatctttatcactgcgaatccggcaccggagacggcggcaagatgtgatgaagtgttaagggttgcctatctgaaaaacctggatacaggtacgaaaatttcaccacagttttctattctggttatgatcgatattctgtattcgtattattttgcgaatgattcgtattttaaggcgcaaaaatataaagaaacattatctgccatacagggaaaacataagggagcaatggaagatgcggaaaaaggagaagatccggaatgagtaacggaaaaacatatttgggtgtggatataggtggtacatccgtaaaactggggcttgtagatgaacagggtgtaatccggtatagtgaggcttacgatgttgcatttgacaggtatgagacaccgattcttaagacagttttaaaaagtatgaaattgtttcttgcggaacacgaggtgacggaacaggagctggcgggaattggtgtgtcggctaccggcggcattgatacggtaaatggtgttgtcatcggatcagcagggcatattcaaaactgggaaggaagccggatcaaagaggagatggaaaaaatgtttcatctcccgacgacggtattgaacgatgccaatgcggcggctcttggagaaatgtggatcggagctgcagcagaccgtcggaatgttattgtaatgacggttgggactggtgttggaggtggaatcattgtagattctaagatccttctgggcgcaaatggtcttgccggtgagatcggacatattgtgataaacagtgatggtgagctgtgttcgtgtggcaatcatggctgtatggaacattatggttcaaccactgctctgattcgcagagtcagagatgcggcatcctgcgggaagataatacttccggaagaacaggaactggacggaagatttattttttcggaagcagaaaagggcagcactgcaatgttggaactgcttgattcctggatcgatgacattgcctccggtctggtcggactggttcatatctttaatcccgaactgattttgattggtgggggagtctcggcacaaaaggagctgtttattgaccgtctgagggaaaaagtgatggcaagatgtatgcctcattttgtgaagcatcttgaactaaaggcggctgaacttggaaatgatgcaggcttgattggagcagtatattattgtatacaacagaatgatctggtttgtgataagtgaacgaaatgtgtgcctgcggtataggagtcggatgtctcgtttaggtttattatagaagtgaaacagaactggttaaaagaatcgggttaaatggaaagtattttcataaaacaggggatcgtaataagggttttacttgagaaatggcggaattatggtataatagacgagaaaatgcctgatttaggcagaaatgatttgcaaagaaatgcaggagagaagaaaatgaaaaagattttagaccttataaccgcggaaattacacaggcgtttgtggattgtggctatgatgcaaaatacggaaaggttactttatctaacagaccggatctttgtgaatatcagtgtaacggggcaatggcagctgcaaaagagtacaaaaaagcaccgtttatgatcgcagatgaggttgcagcaaaacttgcagagacatccatgttttccatggcagaatccgtaaaaccgggatttttaaatttaaaactggatgagacatttttagcatcctatgtggcagacatgcaggcagatgaaggacgttttggatgtgaaaaagcagaaaatccaaagaccatcatgatcgattacggcggaccgaacgtggcaaaaccattgcatgtcggtcatttacgttccgcgatcatcggagaaagcatcaaaagaattggtaaatttgtcggacataaagtgatcggagacgtacatttaggagactggggactgcagatgggactgattatcaccgagttaaagctgcgtcagccggagcttgtctattttgatgaaaacttcgagggtgaatatccgaaagaagcaccgtttacgatttctgaattagaggaaatctatccgaccgcaagtaaaaagtcaaaagaggatgaggcatacaaagaggcagccatgcaggcaacttatgagctgcagaatggaagaaagggctatcaggcattactttcccatatcttaaacgtgtctgtgacagacttaaagaaaaattatgagaatttaaacgtatcttttgaactctggaagggtgaatccgatgcacagccttatattccggcaatggtgcagaagatgaaagatgacggttttgcctatgtcagtgacggagcattggttgtcgatgtgaaagaagataccgatacgaaagagatcccgccgtgtatgatcttaaaatcagacggtgcatccctctataatacgaccgatcttgcaacgatcgtatggcgtgaggaagattatgatccggacgagattatttatgtggtagataagagacaggaacttcatttcgtacaggtattccgctgcgcaagaaagaccggtctggtgaaaccggagaccgaattaaaattcttaggattcggtacgatgaacggcaaggacggaaagccgtttaagaccagagatggtggtgtcatgcgtttagagtatcttgtatctgagattgataatgagatgttaaagaagattaccgaaaaccagaaggcaaaagagaatcttggaatcagcgaggaagaagcaaaggaaactgcaaaaacagttgcacttgccgcaatcaaatatggagatctttctaatcaggcaagtaaagactatatttttgatatcgacagatttacttcttttgagggaaatacaggaccatacattttgtatacgatcgttcgtatcaagtcgattcttcacaaatatcatgatttaggaaagaacgcagataattcagtgatcacggcagcacattctgagagtgagaagaatctgatgttagaactgtccaaatttaatgcagtgatcgagggtgcatttaccgatacggcaccgcacaagatctgttcctatatttatgatcttgccaatgcattcaacagtttctatcatgagacaaagatcatgtctgaggaagatgagacggttcagaaatcgtatatccgtctgttggaactgacgaaatctgtgcttgagaccagcattgatctgcttggattctctgcaccggagcgtatgtaggaaaaaagtcttattttctgtcagaagaaaatatggtatactgtttttgaaaagcaaaacaaggagcaaaacaaggaggattaatatgaaaaagttaagcaaaaaggtaattgcgtttgcacttgcggttgtgatgactctgacagccggtgcagtggcaccacagggaaacgttgaagtacaggcggcaagcggaagggtttatgtgaatccttattcagcgactgttgtgacctataagccagggaaagatgtaaatactttcacaagtacaatcagcattatgggctgcaacaaagcaaaagagatcaaaaaattaaagagcagcaacaaaaatattagggttgctgcaagagatggttatatccgtgttgagtatggcaaaaaagaagcaaagagtacgatcacatgtacggtaaaaggtgtaaagttaaaaacaacatttacagtcaaaaaatacaccaatccatgcaagacatttaaaatcggaaaaacaaacctgctttcaaaatttaataaaaatgatgtacttagaacgaacaaggcatttaaaaaacaaaaattggacatcaaactgaaaagtggctggaagatctcaagcgttcatgtgacatccggaacaggaagttataataactatagagtaaataaatccagtttctctaagaagatcacagtgtcaaacaattatggatacatatatgtgtattgctataatgaaaaaacgaaggtttctgaatgtctgcagattaatacatctacaagatactaagattgaaaaaagaaccgtaagccggatttggcttagggttcttttttttcgaaaatacattgttgatattgtataaaatagacaaaaaaatgaaaaaacgtattgaattttaagtgataagtactataataagggtaagcaataagaaactagcatttatacatatgggaggtgttattatgattagtttttttatttgcctggcgttattaattggtgggtactttgtttatggtaaggtagtggagaacacattcgcaccggatgacagagagacaccggcagtaaggatcaacgatggggttgactatgttgtcatgccggaatggaagctctttttggtgcagttgttaaacattgccggattaggaccgatcttcggtgctatgcagggtgctctctggggaccggttgtctttttgtggatcacgtttggtaccatctttgcaggaggtgtacatgattacttttctggtatgctgtccgaacgtaacgatggtgcttccatttcagaggtatgtggtatctaccttggaaatgtgatgaagaatgtcatgcgtgtattcagtgttgtactgcttgttatggtaggtaccgttttcgcagtaggacctgcaggacttatcgttacactgtttaagaacagtggtgtgacaggaattgtcacaagcgcagagttctggctgtggatcattcttctttattatttcatcgcaacatttatttctattgataagatcattggacgtatttacccgctgtttggtatctgcctgatcataatggcggtgggtgttatcattggtatttttacacattccgaatatacgatgccggagatctggagtcatttcggtaacatgcatccggatggcaaaccgatctggagtttcatgtttatcacagtagcatgtggagcaatctcaggattccattccacacagtcaccacttatggcacgttgtatgaagtctgagaaacagggacatttcgtattttacggtgcaatggttgctgagggcgttatcgctctgatctgggcagcagcaggatgttctatttatgaggttacaggtggtttaaacacaggactcgcagagatcctttccggtggacagtccgcagctatttatgatgtatgtatcaagacaatgggaagcgttggtgtagcacttgcaatgatcggtgttattgtctgcccgatcacatctggtgataccgcattcagaagtgcacgtctggtattggcagactggtttaagatcgatcaggataagatccagaaacgtctgttactctgtgtaccgcttcttgcagttggtgcttttgtaggacatctggattatgcggttgtatggagatatttcagctggacgaaccagacacttgccatgatcgtattatggacggcaagcatgtatctgttccgtgagaaaaagaattactggatcacggctgtaccggcaacctttatgagtgccgtatccatgacctatttcttctgcgcagatgagtgccttggattctctacagcagttgcatatccggtgggaatcattctggctgttgtattcttgggaatttttatccacgcaacaaagaaaccggcaaaaatgtaatacatgacagcgatgcttaacaggtataaaaagtaatacaggaatggagctgaggaagatgttgaaaccacagagactgggcaacctgtcactgcccgacatggaattgacggaagacaaaaagacatgcagaaaatttggaccatgtggtgttggtaagaaagccatttatctgaacagtttctacatagaaagaagatactatgttccgatgaagtcggtgaagcgtattttcaaaagaattgcgatgagcaaaggtggatttaccggtaaaggtgcatttggcacgctgccttatctcgtggttgaatatgatgatggcaaagaaaagcagtgcaattttaaacatgaggaggatgtggaccgcctgcttgcttatgtggaggtcaactttccgcagataccgttgcacagtgaggttgcggagcaaaaactcgcagagaaggcaaagcggatggaagaaaagcagcgtatcggaaatatttcagaaactgcaaagaaaaatatccgctgtctcgataatgcaatcaaatatcttcataaggatacagatctgtatttgaatctgagtcagtcagctaagaagaaaagagtttatgaccggagtaatccggcatacaaatgggttgcacttgcaattacactgatgggacttggagcttttgggtatggtatatattcattggctacacacgcaggatttggaatttatttccttttgttcggtcttgcagcaatctttttgttttccggtgctagtgtactgccgacgtcacataataacagaagctatattgaaaagcagttattaaatgcggtagacgagatggaacaatatatcaaaacatatcctgatttcccggttccggcatgttatgcacatccggttgtactaaagaggatgcaggatattttaaaggaaggacgcgcagagacgataccggcggcacttagagtgctgaaagaggatttaaaagcgttaaattccagtgtggtagtggaacaggaggaatacgatgaaatcgtagccatcaaaccgatgttccttgtaatggattacagataaaaaataaaagaaaataccggcggcgaaacgttaagaaaagtcttacgtttggcaggccggtatttttatgcataaaaataagcctgtctcatagaatgaattaaaagaaaagggaggaggcatatggaaaacctaaaagttttgtttccggtacatatcagaaaaaaaataaaaaataatctgtggctgaatgatcttgaggaaatccggatccgggcaggacagccaatcgagcttgcgtattccgggaaaacacgttatctgacggatatggacggtgaaatgtgtgcctgtgtcagagaaagcgtacagaatgcaagagcatgttacagaataacgggcgcagatattgcagagatgttaagctatatcagcgagtattccctgtatgcataccaggaggaactaaggcagggatatattacaattgagggtggtcaccgggttggaattgcaggggagattgcaaaagacagggaaggtattacagggatcaaatatattagttttatgaatatccgtgtggcacatgaaaaaaaaggatgtgcagaaaaaattctgccttttctgaaggacggagaaagtatttataatacactgctggtgtcaaaaccgggtgcaggcaaaacaacctgtctgcgggattgtatccgcagtctctcaaatgggaaagaaggctgggaaggtatgaaaatctgtgtggtggatgagaggtctgagattgcagcctgtcatcttggaattccacaaaatgatatgggaatacgaacggatgttttgtctggatgtgggaaatcagagggaatgatgctcatgctgcgctccatgtccccgcagatcatagcggtggatgaacttggagggaaaaaagattttcaggcagtcgaacaggcagcctgttccggggtacggattcttggaacagtacatgcggatacggtggaagaattatgggagaaaccatatctgaaaaagtggatgaagcgtggaatttttgaacgatttattctgatccggcataaccggtccggcgagcgggattttcaggtttttaacggaaaaagagaacagttatgctaaagctgataggtggtattctggttgcaggttccggggttggacttgcagtaaacatgatcgctgaaatcaggcagcatctgcttagattgtatgaaatccgtcagcttctcataaatatttcgggagaggcagcacttgcattacttccgatggagcatattttgaatcaaccgacgctgacgaacgatgtggtgttgcaaaaagtatgcggacagattgctgatcgtcttgctgcaaaaaagggagaaagcggaggtgaaatctggtgggatatattttggaaaaatcgaaaagaattgggaatctgtgcgtctgaacttgagattattgcgaatgccggaaatgctttttttggaagaaatataaaagagaatgaaagaatgctttctatttatttagagaggcttgattttgtgatcgaacaagagcggaaagagcagagagaaaagcagagagtggccggggcggtcagtgtaataggaggaatgatgttagtgatactttttatataacgcaaaaataaagtgtgtatacggcaagcaagagaggggactggattacggatgagtgttaatttgatatttaaaattgcggcggtcgggattttagtcacggtcatcagtcaggtgctaaaacatagcggaagagaggaacatgcatttctgacaagccttgcgggattgctgattgtcctcttttggattgttccttatatttatgaattgtttgaaacaatgcagtcactgtttgcattataagatgttacagaatgggaatgaggcatgaaatggatattttaagaatagcggttcttggtatcgcaggagtacttctggcacttttactgcagaaagaaaaaagtgaatacagcatgtttatcagtatggcagtctgcatctgcatttttatttatattcttggaaaggtggagactgtcatcaattttgcaaaaaaaatgcagacgtttgttgcagtggatcagacgtatatcacactgatattaaaaatggttgggatcacctatgtggcggagtttgcgatgaatatctgtaaagatgctggatatgcggcagtcggaaatcagatcgaactgtttgctaagctgtcgattctggtgcttagtattccggttttgacggtttttttagagacagtcgggagctttttatgaaaaaatggggagtgtgtgtgatatgtattctgttactctgtgtgattgagacggttccggttttcgcatctgaaaaaaatactcaggattatttagggaacatgacagaagaactggatttttcgaagctggatcattttatgagacaggatgcagaggatagtgggattacattttcagaactggtgaaagaattactgtatcaggagaagccaggggcgctgtatcagcagatcggaccatggctaatggggcaattatgtgagtcagtctgtgaaaaccgcaaaatattagtggaggtggtgctgcttgccgtgtgtttttctgtacttaaaaattttgccggtgcgtttgcgtcatcttatgtatcagatctttgttttatccttgtattctgtgtattagcagtcttgatgctgcagtcatttctgacgtttcgtgagattgtgtgcggtgtattggaaaagagtgtggatttttttcagatttttataccgacatttagtattgcaatgcttttttcggcgggagaaagcattgcatcgggcttctatcagacggcttttctgatcatatatctgatcgagtggctgtttttaaccattttagtgccaatgatccatatttatatactgactgtgctgatcaattatttctttgaggaagaaaagtttgcaaacatgatggaattgattggaggactgatcgggtgggcaatcagatctgccggaatcattgtacttgggctgaatgttgtgcaggggatcgttgcaccggcaaaggacaggctgctttatgggacagcaggacgggcaatggcaatgatacccggaattggtaatacagtgaatggtgtcagtgaacttttgcttggttctggaattatgatccggaactgtgttggggcagccgggttgatcgtactgattattttagtggcagtgccgatggtacaggcaggctgtatggtacttttttataaaattgcagctgctgtggtggaacctgttgcagataagagaatcgccggatgtttaaagggaatggcacagggggggatgctgtacctgaaattgatgggatattgtgtgatgctgatttttctgacgatcgcgcttacggttgcttcctccgggtttggctattaagaaagtgagaaacggatgaacgtattgatcgtgtatattcaaaaaatttttgccctttttctgttgcttgtggttgcaagacagctgatcccgaatggaagattaaaaaaatatatttatttttttacggaacttgtgctcatcattggtgtcatgcagccttttttttctttttggggggataatgatgctttgcttgataagatcaggtctgaaacgtttacggaaaatttaagtgaggcttcaagagacatcagccgtatggagtatttacggaatgattattaccgcagagaatatgaaaatgcggcagcgctggatgtaaagggaactgcagaaggatatttagaacagtttggatttatggtaaagcaatcatcggtggaactgacagaaaattatgaagtgagaaaaattatactcacggtagcagaaaaagaagccagggacacagaaggaatctttgtggaacagggaaaagcgcagggcagccagattgtgcttgacgaactgaagcagaaacttgtgcaatattatggggcagaggaagaacagatacagatttcctatggtggtgaaagatgacggagagactgaaagagtttttacagcagaaaaggtggctccagttaaaaaaaacggactggatcgcagttgctcttgttggggtgcttcttcttgtggtggcaatgccttccggtggaacaggtatacatctggcggaaaataaaaaagaggacaccgcacaggagaaaacggaacagaaatacgaaaaagaggactatgcggaatatttagagcataaattagaacaggtgctaggacagatggaaggagtggggaaagtttctgtcatggtcacggtggcagatcagggggaagatatcatagaaaaggataagacagagcatacgtccaccgtcacaaatacggacagcgggagtatggagatgacgacggaaaaggaaagtggggaggagacggtatatgaggagagcggcggcgaaaaagcgccgtatgtcagcaaagaaatacttccggagatcgagggggtgcttgtggtggcagaggggggagacagcccacggatcgtttctgatatttcagatgccgtaaaggcattatttcaggtggaagcacatagaattaaggtagtaaagatgagttcgaaggaggatggaacgtgaaaaagatatttcagaaaaaccagctgattattacagcactcgcgttgatgattgcggtggcgggatatttcagttacatgaacaatcacattgatgacggtatggcagcggagacggcggcaaatgcaggtacagatgcactgaatgcagaatatgagatctcggatgaagatccactggctgcggaagatatttttacggatgagggaaccggggaggaacttgcacttgtggatgggacggagactgcggatgcaggaaccggcgaagatacatacgatgcggcagatgcagctgtgacggacggtcaggatgttgcagaaaatgcggcagatggacagaatgcggtggcagatgtgagcgcagatgcagcggatgtggcagacatgacgtcccaggatgcagaggagattgaaaatcccggggaggcggttctcacaagtaccggcactgcaaatctcgactatgcagcaagaatgaaattaaaccgcgaacagatccggtctaaaaataaagaggcgttattagagatcgtaaacaatacatccgttgcagataacttaaagcaggatgccgtgaacaagatggtggcaatgacagatatcgcggagcgagaagccgcagcagaaatgctcttagaggcaaaaggattttcagatgtcgtggtcagcattaccgatgataactgtgatgtcgtactgaatatgggagaagtgactgatgcaaaaagagcacaggtggaggatattgtgaagcgaaaaaccaatatttccgcagataagatcgtgatcacaccgatcgtggtaacagacgccgagtagggcgtctgtttctttgcattttacttgattttttcatggttacggtttatcctagtacggtagaaagagagtacattgtgcgaaatggatttttacatgcgggaatggagacttttaatatgaagagagtatttttgatcgtacttgacagcgttgggatcggggaaatgccggatgcggcagattatggcgatgctggaagcaataccataagagcggtagcatccagtccgtatttttcgatgccgaacatgaggaaacttggattttttaatatagacggagtggagatcggagaaaaagaaaaggatccggccggctcttttgcgagaatgacggaggtatcgaaaggaaaagatacgacgatcgggcactgggagattgcgggcatcatctcaaacagtccgctgccgacttacccggatggatttccacaggaaattttagacgagtttacgaagagaaccggaagaggagtgctctgcaataaaccgtattccgggacagatgtcatccgcgattacggcgaagaacacatgaaaacgggaaaactgatcgtatatacatctgcagattcagtatttcaggtggcagcgcacgaggatgtcattccggttgagacactttacgaatactgtaagattgcaaggaaaatactgaccggggaaaacggtgtgggacgcgtgatcgcaagaccgtttgttggcacgccgggcaattttacaagaacggtacgccgtcatgatttttccctgcagccaccgaaagtgacgatgttagatcagttgtgcggacatggatatgatgtgcgttccgtgggcaagatcattgatatttttgcagaaaaaggaatcaaagagtatgtgcgcacgactggaaatgaggatggaatcaacaagacgattgcgtatatgaaacaggattttgagggactttgttttacaaatcttgtagattatgatatgctctacgggcaccgcaatgatgtggaaggctacgcaaaggcactgacttattttgatgagcgtctgccggagctaatagctgcaatgagagatgaggatatcttaatgatcacggcagatcacggctgtgatccaagcacaccgtcgaccgatcattcgagagaatatacaccgcttgtgatgtatggaaaaccgatcagagcgggtgttaattacggaacaagaggctgcttttcggatattgcggcaaccattcttgcttattttgacattaagccggagtgtgcgggagaggcaatcccgattttataaggatttttggaggataaaatagttttggctgatttaagaaaagagatagaaaaaagacgtacatttgcaatcatttcccacccggatgcaggtaaaacgactctgacagagaagttcctgctctacggaggagcaatcaatcttgccggttccgtcaagggaaaggcaactgcacgccatgcggtatctgactggatggagatcgagaaggagagaggtatttccgttacttcttctgtgttacagtttaattatggcggctactgcatcaatattctggatacaccgggacatcaggatttctcagaggatacttaccgtaccctgatggctgcggactctgcggtcatggtcattgatggatcaaagggtgtcgaggcacagacgagaaaattatttaaggtctgcgtgatgcgccatattccgatttttacttttatcaataaaatggaccgcgatgcgaatgatacgtttgatctgttagacgagattgaaaaagaacttgggatcgcaacctgtccggtcaactggccaattggttccggaaagaattttaagggtgtatatgaccgtaacacaaaagaggtcatgacgttctccgacacgttaaagggaacgaaagagggaaccgaaaagcatattgcagcggatgatcctgcactgatcgaggagattggacaggacgcatacgataagctgatggaggagatcgagcttctcgacggggcaagtgcagagtttgatatggatcttgtcacaaaaggacaactctccccggtatttttcggatctgccctgaccaactttggtgtggagacatttttacagcatttcttaaaaatgacatattccccgctgccgcgtaaggctgatattggggagatcgatccgtttgatgagcatttttccgcatttgtatttaagatacaggcaaacatgaataaggcgcaccgtgaccgtatcgcatttatgcgtatctgttccggaaaatttaccgccggtatggaggttacgcatgtacagggaggcaataaaaagatcaaactgtcacagccgcagcagatgatggcacaggagcgtcatatcgtggatgaggcatatgcgggggatatcatcggtgtgttcgatccgggcattttttcaattggagatacgcttaccacagcaaaaccgttccagtttgaaggaatccctacctttgcaccggaacattttgcaagagtgcgtcaggtagataccatgaaacgtaaacagttcatgaaaggtatgcagcagatcgcacaggaaggtgcaatccagatcttccaggaatataatatgggtatggaagaagtcatcgtcggcgttgtcggtgtccttcagtttgatgttttaaaataccgtctggaaaatgaatataatgttgagatccgcatggacaacctgccatacgagcatatccgctggatcgaaaacgaggagatcgatatggacaagcttgtcggaacttcggatatgaagaagatccaggatttaaagggcagaccgttactcttatttgtcaatgcatggagtgttggtatggtgcttgaccgaaatgagggactggtgctctctgagttcgggcgtgagtaaaggacaggtttagctggcaaattctgtaatacgcgggtattgtcagttaagtgaatttagacagcaggaaaaggaaaacagaaaatggcagttatcacaatcacaaaagataattttgaaaatgaagtactcggtgcaaaacttccggttgtattagatttctgggcagagtggtgtgcgccgtgtaaaatgcagtcaccggtgattgaggcgcttgcggaagaattagaaggcaaggtcatcttcggtaaagtcaatgttgacgaggaggctgcgctggcattgaaatatcagattatgagcatcccgacgctggttgtcatgaaatacggattatttcagaaccgtgcagtcggactgcagacaagagaagagatcatagatatgatcgagcagatcaaagaagactaaaaacaatagaatgcacactttgcgaacattctattgtcatgaataatagaatgctcgcttcacgaacattctattatgatgaatcacttcaggcatagccgtgcgaaactcatcagcagctgtgagtttcacatggctatgccttatttttctgataagcagccttttccgcctgcatctccaaatacatccgcatcacattccatttccgatttgtcggcgtaagcactgccttataatctatgacaacctgatccctgcggagagatgctaaaagtttatccatctttttctctgtaaaatcacagaaaacaatcagacttcccgcaggaaccttcccggaaaaaggctgaatcaaaggggaagcagtcttatttgcaatcatctccaatggttttaaataatcagaggaaggaacctcctccacacggaccttcaaagcccccgtgatctgctttaattttttgagattgttgtcatctaaatgaaataccagtaatttttccatgtgtaactccgtttcatatttatagaatagacatattataagagttttgcagcagggtgtaaatatgttttatagcaaagattaagctgcaaaaaggtgtatcaaaacctgatggccggcaaatcgcacaaaacagacccggcattgtgcaatttgccattcacgaaactcagttacaccttttgcagctgaacacagtcttaactttatggcaagtcttaattttatgaaagaaactacttgtaaagaaaccaccactatgatacacttgtcgataaggaaaatcatttccgctaaggttgtcagataaaaatcttcaccgccctttggtggcggttcacaggcagaaatctgccggtttatcccataaataaaaagaaatagcataactggaaaaggtgtgctgcagactgtcatatgtcagatggggaagcatatggaaaattgcagacaattttgtggttgacatttcgggaaaaatataatactattagaacagaaaaaacgaacataagttcgcacggaggaaagaaatggcaaaggaagataaatataaagagatcaatgcagtaaaaaatgataaattaaaagcgttggatgctgcaatttcacagattgagaaacagtacggcaaaggctccatcatgaaacttggtgataattccgcacatatgaatgtggagacgattccgaccggatcattaagtcttgatattgcacttggtttaggtggactcccgaaaggaagaatcatcgagatctatggaccggagtccagtggtaagacgaccgttgccctgcatgcggttgctgaggtacagaaaagaggcggtatcgcaggatttatcgatgcagagcatgccttagatcctgtctatgcaaagaatatcggcgttgacatcgacaacttatacatatcccagccggactgcggagagcaggcacttgagatcacagagaccatggtacgttccggggcggttgatatcgtgatcgtcgactccgtggcagcactcgttccaaaggcagagattgatggagatatgggtgattcgcatgtcggacttcaggcacgactgatgagccaggcacttcgtaagctgacttctgtcatcagcaaatccaactgtgtggttatcttcatcaaccagcttcgtgaaaaagtaggcgtaatgtttggtaatccggagacaacgaccggtggacgtgcactgaagttctattcttctgtccgtatggatgtcagaaggattgaggcattaaaacagggcggagaggttgttggtaaccgtaccagggtaaaaattgttaagaataaggtggcaccgccattccgtgaagcagagtttgatatcatgtttggacagggaatttccagagagggcgatatcttagaccttgcagcagataagggtgtggttaacaaatccggagcatggtatgcatacaatggagataagatcggccagggacgtgagaatgcaaaacagtatctgaaagaaaatccgctgatctgtgaggagatcgaggcaaaagtcagagaaatgttaaatgtggacggaacggaagagtctgaggaaacaaaggaaaacgagactgaggcacagagcataaaagcagcggaagcgatcgcaaaaaaagcggaagcggctgaaaagaaagcagagaatacagccgaggtaaaagcggaggaataaaagatgcaggagttgcttgtcgtagaagtaattccccgggaaaaaggaaggacttccattcggtttgacaacgggatggaagtccttttatataagggtgaggtaagaaaattatccttgcgggaggggactgtcatatcccgggagaaatatgatgagatcatctatgaaatacttggaacgcgggcgaagaaacgtgcgatgtttcttttggaacgaatggaccggacggaacatcagctgcgggagaagctgatgcagaacgggtatcctgatgtgtgcgtggatcttgcagtggagtatgtcagaaaatatcactatatcgatgatctgcgctatgcgacgacctatatttcatatcaacagaagaaaaaaagccgtcagaaattaaaaatggatcttatagcaaaaggaattgaaaaaagtgtgatagaacaggcacttgatgaggtgttcgacagtgatgaacagttaaagatccgtcagcttttagaaaagaaacattatgaaccaaaaggatgtgaccgcaaagaacagcagaaaatttaccagtatctgatgcgccgtggatttaagagcagcgatattttgcatgtcatgaaaatctgggatgaatacgaggaataagaacataggaaaacgggggatttttggtacaatatgttgtattgttgcaaaataaaaatgcaatattatgcacattgaacagttatctacttgacataaatattaaaatagaataaaatttatatgttgtaattatgacagataacaaaccatgtttttatgttatatgtacaatgaaaatttaataaaggaggtgctcctgtgggaagtgtgattatcgctgttgtgatcactctactggttaccgcggtcgttgtatatttcgtcacaactgcttactataaaaaagtaacagaggctaagatcggaaatgcagatgaaaaagcgcgtgagattattgatgaagcggtaaaaacggcagaaaccaagaagcgtgaagcaatgcttgaagcgaaggaagaatccatccgtgtcaagaatgacttagacaaggaggtaaaagagcggagagcggagatcggacgcagtgaacgacgcattgttcagaaggaagaaaatctggacaaaaagttagaagcgatcgaaaaacgcgaggcgggatttgcagccaaggaagaagagatcaacagacagaaagcgcaggtcgcaaagctcaatgaagagcgtgtgaaagaactggaaaggatctccggtttaacctccgaacaggcaaaggattatctcttaaagactgttgaagaagacgttaaaattgatactgcaaaattgatcaaagaaatggaacacaaggcaaaggaagaagctgataagaaggcaaaagagtatgtggtgactgcaattcagaagtgtgctgcggatcatgttgccgaaacgacgatttctgttgtacagcttccgaatgacgaaatgaaaggaagaatcatcggacgtgaaggacgtaatatccgtacgttagaaacgttaaccggtgtggatctgatcattgatgatacgccggaggcagtgattttatccggttttgatccgattcgtcgtgaagttgccagaattgctttggaaaaactgattgtggatggtcgtatccatccagcaagaatcgaggaaatggttgagaaggctcagaaagaagtcgagacaatgattcgtgaggaaggtgaggcagcaaccttagaggttggtgttcacggaatccatccggagcttgtgcgtcttttaggccggatgaaattccggacgagctacggacaaaatgctctcaaacattccattgaagtagcacagctttccggattactggctgctgaaatcggtgtagatgtaagaactgcaaaacgtgcaggattgttacatgatattggtaaatctgtcgatcatgatatggaaggttcccatattcagatcggtgtggatttatgtagaaaatacaaagagtcaccaattattatcaatgcggtagaagcgcatcatggtgatgtagaaccggagtcattaattgcatgtatcattcaggctgcagatacaattagtgcagcaagaccaggtgccagaagagagacactggaaacatattcaaacagattgaaacagttagaagatatttctaacggatttaagggtgtagaaaaatccttcgctattcaggcgggcagggagattcgaatcatggttgttccggagcagatcagcgatgccgatatggtattgcttgcgcgtgatatttccaaacagatcgaagctgaattggaatatccgggacagattaaggtaaatgttattcgtgagtcaagggtaacagattacgcgaagtgattcgtgacaatggggttgctcgcagagcgtgcaatctattgtatgaaaaataaagagactgccgtaccggtgtcataaatgaccggtacggcagtttttgcatatatggaatcagagaaagacggaattctgaaaaaaatagtgccaggatgtaaaatatatgttaaaatacatctgaaaatgagtgaaagaaaggtggtgtggcaaatgcagagagtaaaacagcataagtggtttctgtttatcctgattggatttatcgtaatatctttctttcagtttttaccgctgacagatacactgcatttgtatgaaaagacaccgcagagttttgaactgaccgcaggcgggctcctgaagtatggaatagaaggacaaaatgcagaccaggcaggggaatgtgaactagaagaatatcacacagaccggttgacgggaccggaaatagcagaacgtcaggcatgcggtctcccggaagaaacaccggcggctacactggcgcgaacgacacagagtgaagctgcgctgggtgaacagaatcagagccgttttcagatgttacggtttttagtagaagtatatgtacttttaatgatcccggcagttattctgcatatggcactaaaaagatttagcagccatatgatcatactgtggcagaatataaaatacatacatcttgttgatggtaagaaggcaaaacgtattcctgtaattgaataaaaagatgatattacaggaggcgtattaacgtgatagaaaatagaataagtgacagagcaaaaatattactgatcgatgaggatacaagcatttcttatctgatccgcagggcaatggaaaaagaaaattacaagatttatattgcaggaagtggaaaacagggaatggagatgagtaccggtgtctgtccggatctgattctgatggataataaattttctgatatggaagggatcaccttgatccagtggttcagggagtggacggattgcccgattataatcctgtcggaacggagcagctaccttgataaagtggaggcattatatgccggagcagatgattatatggtaaaaccgtttcatgagaaggaacttgcggcacggattttttccgcattacgcagaagaatttcggcaggtgcgcatacatattacgaggcaggaaatcttaaggttgattttacaaaaagacaggttttgcttggaggaacggaggttcatttttcaccggtggaataccggatcatagaaagtcttgcgttaaattctggtacggttgtaacatatcagatgcttttggaaaaaatatggggaccatatgcagagcaaaacagcaggatccttcgtgtcaatatgacgaatatccgaaaaaaaatagaaagttctcctttagaaccggagtatattacaacgatcccgcgggtaggataccggatgttggagagtcaggctgagaaaggtggcatgcagatgctggaaaatcaggctggcagaaacatgaaagtgatggaaggtcagaatatcagaaatggtatccgtatgatggcataaaaataagctgcacacagaggtgtgcagcttatttttttctggatgtacgataatcttttgactgacagtaagaatcgtaaattgcgtaaacaaaccctccgatgataatgccaatcccgatgacagaaaaaacaatctcaatgactgtcatagtaaaatctccctttcgtaaatttgatgttatcagtataacagtcaaacttataaaagggagattttggcatattccttaatcttttttggaaagagatgaggaaagttttaacactttatttatctgacggtttatttttggcttttagccgttgctttgctaagtacatctgttcatccgcacaggataagagctggtggaaaggtgtgtcagtgtccggtgctatgccattcacttgcctgcgaacagtaacaagtcgccttcgtcgtgtccaaattgtataaaagcagatggaaaataaaggcagagggtggtacaataacaacagatactgtaagaaaataacagacttggaatatattgaagcggaggaatattgtatggatcaacaggttaagagagtaaaaagagaactggtaaaaaatggagccattctggatatttatacagatacgatgcagctgccggacggaaaactcgaagaatgggattttatttcacacagaaaaggggcggcagccgttgttccggtacgcggagacggaaagattctgatggtgcgtcagtaccggaatgcaatcgaccgtatgacacttgagataccggcgggatcaagagacagtgttacagaagacacaaaggtgtgtgctgcacgggagttagaggaggaaacgggataccgcagtgatgatcttacgcgtcttttgtcacttaaaacaacagttgcattttgtgacgagttcattgatgtgtatttagcgcgtaatttaaaaccgggacatcagcatttagatgagggagagttccttgatgtcgaggcacatgacatcgatgaactctgtcggatgatctacgatggaaaattacaggatgcaaaaacagtttctgcacttttggcatataaaaatcttctgaatcaggagaaaaacgcataaactgaagaaaagtgtatgtggggcgtgtgtgaaaaaagaaggatgcctgtttctgcctgtattttttgtgggtgtttttcttgcaaacctgttaaagtataagacaggggatctttgccggatattaaatatatggattttagaacagttcgcatatagcagcatttcaccggaaagactgttctggctgctgctttggaaacggggaaagttcgcattttttttctttttgtttggggaagggtgtggatatgcggtggcatcgacggtatggttgtgtcttctgacaggaacatttggattttttcttgcaatggcgattgcggatcttggaatccgtggtgttgcagttgcgtttgtcggtctgcttccacaggcatttttttatgtggctgcggtactatggtgccgcttttgtggcaaaaacagcagacagtaccggtcaccggtatgtaatccgaaaatccgcataaaacaggcggtggaatctgttgtattttatggggtggcagtaatactggtaatcggcggcgtatttgcagaagcttatatcaatattccgctccttaagatgatcgtaaaaaatttttgaaaagattgcttttcggtctgcttatcattataatgaaaaaatacacaggataaaaagaaagtcaggaaaaaaacatgacacatgacattatggattttattgaatatattcacaatgaaaaacagacatcaaagaatacggaagtttcctatgaacgtgatctccgcaagatgaatgaatatctggaagcgcagaatgtatacggggtgtctgccgttacggagacaaatctgaatgcatatgttatgtttttagaacgtgaaggacggaaaccggcgacggtttcaaggagcattgcatcaatgaaagctttttttcattttcttgaaaaggagcggagaatcgagtcggatccggcatggcgtttgaaagcacctaagattgaaaaaacgatgccgcgtatcctgaccacggaagaagtgacgcttttgttagagcagccgtccggaaatacaccgaaagagctgcgggataaggcgatgcttgaattgctttacgcgacaggaatccgtgtgtcggagctgatatcgttaaaagtctcggatctgaatcttcagatggagtatgtgatctgtacggatatccataaagaacggatcattccatttgggaatgtcgcaagggaggcactgacaagatatatgcaggatggaagagatcatctgatcagccaggcggactgtccgtggctgtttacgaattgtaccggtggtgcaatgagccgtcagggtttctggaaactgatcaagttttatgggaagaaggcggggatcgaatcagagatcacaccgcatacgctgcgccattcgtttgcggcacatctgatcagcaatggagcagatttaaagtcggtgcaggagatgttaggacattctgatatttctacgacacagatttattcgcagatggggcagggaagaatccgggaagtgtatctgaaagcacatccgagaggatagtagtagaaacaatagaatgcatgttctgcaaacactctattgtcatgaataataaaaaaggaactcacagaaatggagttccttttttcagtttgcgcgccatgggcgcgctctaacgggtgtaagtcccgaacacgcccagatagtgggaagtgtatagccgaacagcaagggtgtccatcgcgaggtggaatctgaaggaagctgtaagcaaatctctggtccgacggacagaaatcacatagaaggctaggctgcgagagataagttggctgaaagcaacaaagtctaataactatcacctttgtagtagcagagtaaatgtggcggatatatggagagaaagagcgtgcaccttaagcgtggaggtctcacagaggttccattagcctagtaacaacgaactgtgagaagtcagccgagcccatagtagtgaagaagtctctgtaatggagatggagcaaaggggcgaacaatcaataagtttgagtatgtcttgaattgcagaaatg

SEQ ID NO: 5144 - DNA, 21849 bp, Unknown
  gut microbiota DNA sequence
aaaatggagttttaacagattacagagggtatgaaacagagattgcgattccggcaggggtaacttccatcggtgagtcggcatttgagggaaaagatattgagagcgtcaaagttccggatggggttactgcattaggatatagagcattttatcactgtacgaaattaaagtctgtggaactgccaaagaccttacagacgatcgcatcatatgcattcagaagttgtgaaaatttagaaagcataacagtttccggtacctctgcgaaaaaaggaacggtaatgataccgggcagcgttacggagatgaaagattttacttttggcggaagtgatttaattacggaactggatataacgacttctacggcagttatctctaaccgtattgtagatctgcccaatgtgaatacagtaaaagccaccggcagtacaaaatacaaagtccaggataacatattgtatgataaatcagttgaagatttatactattttccgcagggaagcagcaaaacgcaggtcatactgccggagggcgttgaggttattgaaaaagcagctttttataactgcaaaaatattgaaaatataaccttgccacagaccttatggaagattgatgatatggcactgtgggggtgtgagaagataaagaaactggagctgacttcgaaaatttcaagtgttggaagttatgtattcagggactgtaaggcattagaagagattatagttgtaccggaaaacacatattttaaaagtgtggacggtattttatatgaaaagaagaaatacatgagaatgatggtatgtcctgcgatgaaacagggaattgttacggttgcagacggaatgcatgagattggtacggaggcatttcatgactgtaaatatgtgacagaagtcagactgccggaaagtttagagacaatcaacagcagtgcttttgaaggatgcagtgcgctggaaaaaattgaactgccggataatatcgagcaaattggaatgtatgcatttgaagattgtactgcgttaaagaatgtcagattaccagccggattaacggacattgatcaggcagtgtttgcggggtgtgagtctctggaaaatatcgtgattccagaaggggtaaccagtataaaatacagggcatttgatggctgtgataatttacagtatgcgatcattccggcgtccgtaaccagcatagaggatggtgcatttgaaaccggccggagagacagggatctgctcatttactgtaaggagggaacctgtgcagaaagctatgcaaaagaaaatgatatttcttatgcgtatggaaacacagcgaagaaacggcagacgatcacagcgaatgactttgaaaaaatgtatggagatgagtcattttatattcaggcagctacagacggagatggaaagctgatttataaggtaaaggatgagtctgtggttacggtaagcactgacggaaaagtcacgatcaaaggaacaggaacaacagatgtcgtgatcacggctgcaagaacagacacttacgagtgggcatcgaaaacgatccatatcagtgtccggggtgtagtgaagaaaaaatcgcagacgatcaccgtcgcggatattatcagtatctatgaaggaaatacggtagcattagacgctgcaacgaatggggacggaacaatttcttatgtgtcagatgataaaacggttgcaagcgtggatgcttccggaaaagtctgtggaataaaacaggggacagcacatattactgttcttgcatcagaaacggaattgtatcatgcatcagaggcaatcgtcacagtaactgtgaagccaaaaaagacacagagtaatacagatccggggaaaaaaccatcggataacgtgtcgaaggatgattcacagacaacagaggataaaaaaccttctgatggcggcaacaatacatccgggacaacagatggtcagcagacaaagaagaaacagaccataaaagcaaaaaatatcacaaagacatacagtacaaaaacattttccatcggagcaaagacaaatggtggaggtaaattaacatacaaggtggcagataaaaaaattgcgaccataagtaagaccggaaagatcaaactgaaaaattatggacagacaaaaattacaatcaaagcagccgcaaaaggaaaatataaggcagcaacaaagacgatcacattaaccgtaaaaccggtaaaggtaaaagtaacctctgtaaagcagccaaaggcaaagacgttacaggtaaagtggaaaaaggataagaaggcatccggttatatcattcagtactccacagataagaaattcaaaaagaatgtgaaaaaagctgttgtcacaaaaaaccagaccgttacgaaaaagatcacgaaattaaaaccgggaaagaaatattatgtccgtgtgtgtgcatataaaaattctcacggaaaaaagtacagggaagttatggtacggtaaaaagtgtaaaattgaagtgatatgcatcagcataaaagtggtaaaggatggagaaatgttatgaaaatgaaaagaatactgactggaatgctgggagcagctattttagctgcaggcgtaaatctattgtccgtacaggcggcagaaaatgcaggagtgatggaatatatagctgcgacagaatacatagaggaaacagaagcagcagagccggaaaatgcagaaaaacaggtgtttgaaactgaagaagatacaaaaacagcagatacgggtgaatttacgatcaacaacggtctgttgacaaaatataccggaacagcagagacggttacaatcccttcaaatgtccgtagaattggcaagtcagcatttcagaataataaatacatcaaaagcgtaatcattccgggaaatgtacggaaaattgaaatactggcattttatggatgcagcaatctggaaagtgtcacaatggcagaaggtgtagaagagattggtatgcagacattttccgaaactcatttgaaaagtgttgttcttcccaaatccataatcaaaatggatagacttgtgtttacaagctgcaatcggctgacaagtattgattttacagagggcacttataatattaatggtgatatcataggttcctgtgctgcgctgacagagataaaggtttcaggcaataatacgagatatcaggttaaagataacgtgttatatgaaaagaatggaaaaacagtttgttattgtccgtcaggccgcaagactgatatgaatgtgccggatggagtagagcatatcggagattttgcattctgggattgtcttacaacgaaagttacacttcctgatagtgtaaaaagtattggagaacgggcatttttttcgaccggaatggagacgatgatacttccggcgaatctggagtcgatcggaaaagaagcatttttttattgccaaaatttaaaacagatcacaattccggctaagacaacaaaaataggaaacaatgtgttcggcagctgtgatcacttagagacgatcaatgtggcggcagggaatacgatatacagatcagaggatggcatattgtatggcacagaggaaggcagactcgtgttgattaattgtcctgccgggaaaaaagggaacgtgaagatcttagaggggacggtgggaatccttgatggttccttcagtaactgtgaaaagatcacattggtagatatgccggacagcgtaaagagcattggcgaagatgcatttaaatcctgttcctcgcttataaaagtccggttctcaaatcagcttacggatataggaaactatgccttttataggtgtgattccatgcagcaggtacatctgccggacagtgttaaagatttgggggcatgggctttccggtattgtgatgcgttaacagaagtaacaatttccaaaaatatttcggatattccggataatgcgtttggtggctgtacaaatctgaccggtattaccataccggacggggtaaaaacaatagcagacaatgcgttttcgtattgcagcaatttaacgatatactgtagttcaggttctgctgcagaaaaatatgcgaaaaataacaatattaaaagaaaggtaactgacgaacggaaaacccagacgattacgacagataatgataacattgaaaaaacggttggagatccggattttaagataactgcaaaaacaaccggggatggaactctaagtttttattcgggaaacgaagatatcattcaggtatctgaaaatggagctgtaaagatcatcggagcaggtacgaccaatattgtgatcacggcatctgcgacgcaaaattgtaaaatggcgcagacagaaatttatattacaataaaaaataaagaaacggatcaaaagcgtgtgcaaaagatcacgtattcttatcaggcagataaaaaggatctgaatattttctatcttgacgcaaagtcagatggggatggtaagatatcttaccggtcagaaaacgaaaaaatcgtaaaaatagatgcagatggaaaaggatatatcttaggttccgggacagtaaaaattattatctcggcatcagagacagatacctgtgcggcagcgcagaaaatagttacgttaaatgtagaaaaaataacagatcagacagatgaaccggggcagacacaaaagccggatcagacagaaaagccggggcagacagatactccgaatcagccggataagccgtcagaccagaacggtaatgccacacagcagaaaaagaaacagaccataaaagctaaaaatattacaaagacctacagcacaaaaacgtttgccataggtgccaaatcaagttgtggggcaaaactgacctacaaggtggcagataaaaagatcgcagccataagtaagaccggaaaaatcaaattaaagagttacggacagacaaaaatcacaatcaaagcggctgcaaaaggaaaatataaggcagcaacaaagacgattactttaacggtaaaaccggtgaagaaccagattacttctctgaaatcaacaaaagcaaaaacgtttgaagtaaagtggaaaaaagacaaaaaagcgtctggttatatcatcgagtattccacggataaaaaattcaaaaaaaatgtaaaaaaagttgttgtcacaaaaaacaaaaccactaccaaaaaaatcacaaaattaaagccgggaaagaaatactatgtccgcgtatgctcttataaaaattcccgagggaaaagagtgcagggagcttatagtaaggtgaaaactgtgacggtcagaaagtgattgctcctgttattttcggaaataaaagattaaaaaatttaaaagaattaatgtaagaacagctataaacacagtgtttatggttgttcttttttctatttatggttcctgatacctaagtaccaatttgcaaaactttaccaaattaccttgacaaatatttccatcagtcatatactttgaaaagctaattatttgactatcaaactatttgaaaggcaaatgattacatgaatcagaaaataagaaaagaaaatcagcccacaatagaaataagggcaaggcgctggaaaaataataaggcatgcgcagaaaaggagaaaaatatgttagagaaaatgatcccgattattgcagagcagttaaatgtgaatgagtctgaaatcaaggcagagtccaatttcaaagatgacttaggagcagattccttagatttatttgaacttgtcatggctcttgaggaagagtttggcgtggagatcccatctgaggatttaccttctatcgtaactgtcaatgatgttgtcgagtacttaaaaggaaaaggtgtggcttaagtatggagacaagggtaagtaaactgctgggaacgaaatatccggtcattcagggtggtatggcatgggttgcggaatatcatcttgcagcggcagtttcaaatgccggaggtttaggaatcatcggagcggcaagtgcaccgcctgaggtggtcagagagcagatcagggaggcaaagaagctgactgacaaaccgtttggcgtgaacgtcatgctgttaaatccaaatgcagccgaggttgcacagatcgtcattgaagagggcgttaaggttgtgaccacaggtgccggaaatcccggaaaattcatggatgcatggaaacaggcaggcgttgttgtgattccggtcgttgcgagtgttgcaatggcaagaatgatggagcgtggcggagcggacgcagtgattgcagagggaatggagtcaggtggacatatcggtgcacagacgacgatgacactcgttccgcaggtggcagatgcggtacagataccggttattgccgcaggaggaatcgcagacggcagaggcatggcagcggcatttatgctcggtgccgaaggagtacagatgggaaccagatttgtggtggcaaaagaatccatcgtacatccgaattacaaggagcgtgtcatcaaggcaaaagacattgactcagaagtgaccggcatgagcaccggacatccgatccgggttcttcgcaaccagatgagccgcgaatatttaaaaatggaaaaagagggcgcttcatttgaagagttagagcaccttacacttgggtccctgcgcaaggcagtcattgacggtgacgtggtcaacggaagcctgatggcaggacagagcgccggcatggtaaaaaaagaagaaagctgtaaagagatcatcgaggacgttgtgacacaggcggagtcactgcttggaagatagtgcaaaaataagcgcaaaaaacggaggttgaaatgggaaagacggtttttatgtttccgggacagggagcacagtacataggaatggcaaaggatttttacgatgccatcccggaatgcagagaagtatttgaggaggcatccgaggcgtcaggacttgatatcgctgcgttatgctttgaggaaaacgacaagatcaatatcacggagtatacacagatctgtatgctgaccgccgaggctgcgatcctgcgtgcattggaggtaaaaggctataaagcagatgtgactgcaggcttaagcctaggagaatatggagcattgattgcctgcggagcactgagcagaaaagatgcatttgcactggtgtgcaaaagagggatctacatgcaggaggcggtgccggagggcggagccatggcagcagtcctggcactggataccgcgcagatcgaggaagcctgtaaaaaaacagagggcattgtatcgatcgcaaactataactgcccgggacagatcgtcattaccggagaagaaaaagccgtagcggcagccggagagctctgcaaagaagccggagcaaaacgtgttgttccgttaaaggtcagcggaccgttccactcagcaatgttaaagggtgccggagaaaaacttggcgaggaattaaaacatgtaacagtccatacaccggcaatcccgtatgtcgcaaacgtgacagcagactatgtgacaaaagaagaggagatcaaaccattactggaaaaacaggtgtcctcatctgtccgctggcagcagacgatcgagcgtctgatcgcagacggagcagacaaatttgtagagatcggaccggggaaaaccttgacaggattcatgcgcaagatcaaccgtgatgtagctgcagtcaatattgataaatatgaagactttgagaaatttgttgctgagagcaaaaataaataagatatgccacatatttggatgtgaaaaaagtttggcagctatcagaaaaaaggagaagttatgttaactaataaaacggcactggttaccggtgcaagccgcggcatcggagctgcgatcgcaaaaagtcttgcaaaagaaggtgcatttgtcatcatcaattacaacggttctaaagagcgtgccgatgctgttgcggcaaaaatcacagcggatggcggcaaagcggcagtttacggctgcaatgtatctgattatggtgcctgtgaaaaaatggcaaaagacatcatggagacatacggtcatctggatattctggtcaataatgccggtatcacgcgggatgatcttttgatgaaaatgagcgaggaagcatttgacgcggtcattgcgacaaacctcaagggaacttttaacacgatccgtcatttttcacgctatctgttaaagcagcgttccggaacgatcatcaatctatcatccgtatccggtattcttggaaatgcaggacaggcaaattacagtgcgagcaaggcgggcgtgatcggactgaccaaaagtgtggcgagagaactttcttcccgtgggattacctgcaatgcggttgcgccgggattcattgatacggaaatgacagcgcagatgacagacaaggcaaaggaagcagtgaaaacgcagatcccgctcggcagagtcggaaaagtggatgatattgcggaggtagtgacatttttagcctcggagaaagcatcctacatcacaggacaggtaatttccgtggacggcggtatgagcatataagcagtaaaaacattttgaccgcatggtattgtgtcggatcaaaaaggaaaagcctgaatttggggcttgaaaatggaaaggaaaagttatgagcagacgagtagtggtaacaggaatgggcgcgatcactccgatcggacttagtgtagaggagttctggcagtccgtaaaagaaggaaaaatcggtttcggggagatcacaaaatttgatacggaaggatacaaatgccatcttgcagcggaagtaaaagattttgatgcaaaacagtatatggatgcgaaaacggcaagacgtatggaactgttctgccagtatgcagtggcagcagcaaaagaagcgattacagacgccgctcttgacatggaaaaagaagatccttaccgtgtcggtgtatctgtcggaaacggtattggaagtctcgggggaattgagcgtgagcataaaagattgttagaaaaaggtccatctaaagtaaatccgctgttcgtaccgcttgtcatttccaatatggcagccggaaatgtttcgatcgcattcggcttaaaaggaaagagtatcaacgtggtaacggcatgcgcaaccggaacaaacagtatcggagaggcattccgcagtatccagtacggtgaggcagatgtgatggttactggtggaaccgagggcgcgatctgcccgcttggaattgcaggattcacatctctgacggcactttcctctgaaagtgatcctacgaaatgttccattccgtttgataaaaaccgcagcggttttgtgatgggagaaggagcggcaatcgttgtgttagaagaattagagcatgcaaaagcgcgtggggcaaaaatttatgcggaggtagccggatacggaacttcatctgatgcatatcacattacctcccctgctgaggatggtgccggtgcagcccgcgccatgacgaatgcggtggaagatgcaggcatccgtccggaagaaatcacctacatcaatgcacatggaacatccacgcatcacaacgacctgtttgagacgcgtgcgatcaaacttgcttttggcgatcacgcatatgatatgaaggtcaattccacaaaatctatggttggacatctgctcggtgccgccggtgccattgaatttgtaacctgtgtcaaagaaattcaggacagttttgtacatgcgaccgttggttacacgacaccggatgaagaactggatcttgattactgtaaagaggcggtacagatggatgtgccgtatgcactgagcaactcacttggtttcggcggacacaatgcaagtatcctgctgaaaaaatacagtgaataattgggaggaaatgcctctgctcaccagtgggcaaattttattttggaaaacagggaggcaattatgtccgttttaacaacgaaacagatcatggagatcattccgcatcgtcagccgtttttgctgatcgacacggtggaagaattagaatccggcatgcgtgccgttgcaaaaaaatgtgtcagctacaatgagccattctttggcggacattttccaaatgagccggtcatgccgggcgtactgatcattgaagcactggcacagaccggagcggttgcaattctctcggtggaagaaaaccgcggaaaaactgcatattttgcgggaatcaattctgcaaaattcaaacggaaagtagtgccgggagatgtgttgatattggaaacagagatcataaagcaaaaaggcccgatcggtgtcggccgtgccacagcgaaggtgggggatgacattgcatgtatcgcggagctgacatttgcgatcagttgaagttaagagagtctggaacagcgcaggtttgataaataactgtaaacaggcaaaaaggggaaagtatggcagcattttttttgaagaagaaaaaagaagtaacagagacggtagaagaaccacagaaaacggtagaggcagcaaaaaaagaggcagagacagttaatacagagccgccggcaacgatcgtctgtccggcttgtggcagagagatcaataagaaaaccgcggaaaaaaataaatatgtctgttatgagtgcggcaattatttccgcgtccgtaccaaaaacaggatccgcatgattgcggataaggatacctttgagccgtggtttgaggaattggagtcaaaaaatccgcttgattttccgggatatccggagaagatcaaagccgcacaggaaaagacaggactgcatgaggcagtcacagtcggaaaatgcaggatctatggacttgagacggtgatcggcgtgtgtgatgcccggtttatgatgagcagtatggggcatgttgtgggagaaaaaatagcacttgcggtggagcgtgcgacagaactttctcttccggttattttattctgttgttccggtggtgcaagaatgcaggagggaatcgtttccctgatgcagatggcaaagacagcagctgctttaaagaaacattccgaggcaggacttttatatgtgccggtgttaaccgatcctacgaccggaggtgtgacggcaagttttgcgatgttaggagatattatccttgcagagccgggggcactgatcggatttgcagggccgcgtgtcatcgagcagacgatcggagagaaactgccggagggattccagagggcacagttccagttagagcatggttttgtggatgcgatcgtggagcgtaaagatttaaaaatgacactttaccgcattttaaagatgcatcagaaaacggaaggatatgcaaactttgatccgctgcgcagcgatgactgttacgagccgacagaggtcatgaaagagcgcgccacaaaggcacagcctctttccgcatgggaaaaagtgcgtgcggcaagacgtgcagaccggcttgcatcggtggattatatcgacaatatttttgacgacttcatggaatttcacggagacagacagttcgcggatgatcctgcgattgtgggcggtgttgcctaccttgacggccagccggtcactgtgatcggtattcataaaggaaaagatttaaaagactgcatgcgtcacaattacggaatgccgtcaccggaaggttacagaaaagcactgcgtctgatgaaacaggcagaaaaattcaaccgtccgatcatcacatttgtgaacacatccggtgcattctgcggaaaagaagcggaagaacgcggacagggtgaagcaatcgcaagaaatctctatgagatgtcagccatcaaagttccgatcctctgtctgatgatcggagaaggcggaagcggcggtgcgcttgcactgtcggtcggcaatgaagtctggatgcttgaaaatgcaacgtattcggtactttcgccggaaggatttgcatcgatcctctggaaagatggaaaacgtgcaaaagaagccagcgaggtcatgaagatcacggcgcatgatctgtatgcgttaaatattgtggagcaggtaatcccggagtatggcacggcagatgaaaaagcatgtgagtcaatctcaagatatatgaaaggccatatgaaagaatttttagagcgtcagaatggcaagacaggagagcagcttgccgaggagcgctatgcgagattccgtgcgttctgataaaaaggttactggattattttacagagggcagatggaaataaaataaactctggaatgaggaaaaagtatgaaaatcaaaatcaagggaaccggaagtgcggttccaaaacttcgggtgacaaacgatgatttaagtaaactgatggacacctctgacgagtggatcagaagccgtaccggaatcggtgcaagacatcttgcggtggaggagacgacgacagggcttgctgtcgcagcagcaaaggaagcgttaaaagatgcggaaatgactgcggaagaacttgatcttatcattgcagcaacggttacggcggataagtttctgccgaacttatcctgtgaagtgcagagtgcgcttggagcaaaaaatgcagttgcatttgatttaaacgctgcctgctccggatttttgtttgcgttaaatacggttcagatgtatctggaaaatggtgtatacaaaaagacacttgtcattggagcggaaactctttcaaagatcatggactggaatgacagaagcacctgtgtattgtttggggacggtgcaggggcggcggtcgttgaggtggattccgaaacaaattgtaaagcaaagcagccgggtgcagcaaacaaaagcggcattctaagcatgatacagggttccgacggcgcgcggggggaagtcctccgctgtgataaccgtccggtcaataatccatttgcggtcaacgatacgaaactttcctatgtgtcgatgaatggtcaggaagtatataaatttgcagtcaaaacggtgccaaaggtgatagaagaggcagtgaaaaaagcgggacttgaagtgggggatattgatctgttcgtacttcatcaggcaaatctgcgcattattgagtctgttgcaaaaagactgcatcagccgatggaaaagtttcctaccaatctggaagagtgcggcaatatttccgcggcgagcgtgccgattttgcttgataatatcaataaacatggtatgatatgtgaaggtaaaaaaatagttttggcaggatttggagccgggctgacatggggcgcgacggttttggtatggtaaaggcagcagcaaacagactggctgcagtttacatatatgtgaaaggcaatctgtactgccatgaataggagtatatttgaatgacggcagatgaaacattaaatgaattattggtaaaattgtttaaagacattatggagatcgaggggaaatcgctgctcacggatgaatttaaggatcttacctataatgattttcatgtaatagaagcgattggaatgtcagagccaaagagcatgagcacggtggcaaagctgatgaacgttacgaccggaacgctgacaaaggcgatggacggtctgaccgataagggatatgttgtcagggagcgcagcaagcaggataagcgtgttgtctgggtatgtctgaccgaaaaaggaaaggcagcttatctgcatcatgaagagtttcatcaccgtatgatcgaccacattaaggaagaacttaacgcacaggagacaacggtactgatctattcactggcaaaactggtggattttttccagcaggtatacggggagaatgaagaatcgtagagggtttggacaaagttatggatattatatagatatttgtggatgtttttcggaaacgggaggcatcctttttctttatagaagaatgccagggcagatagtgcttttcaattttctgataacacagtcatgatatattttctcaaataaatgttgtaattacaacatacaatctgaccgaaataaattaatatgataccagagacaaggacatcagtgtgaaaaataagatttttcacacgcaggatttgtgcttgcgcacaaacttaagatgcgcaaaagcagcgcaagaatggaggttttcatgaaacagttagaattaaacaacagaaaagtggcagtgatcggatgcggatttgtaggagcgacatcagcgtttggactgatgcagagcggattgttttccgagatggttttgattgatgcaaatacagagaaagcggaaggggaggcaatggatatttcccacggaatcccgtttgcaagaccgatgaagatttatgcgggtggttatgatgatattatggatgcagcaatcatcgttgtgacagccggtgcaaaccagaaaccgggagagacgaggctggatctggttcagaaaaacgtcggcatttttaagagcatcatcccggagatcgcaaagagagattatcagggaatcctgcttatcgtatcaaacccggtcgacattcttacatacaccgcacacaagctgagcggaatgccggaaaaccgcgtgatcggttcaggtacggtgcttgacacggcacgcttaaaatatgagctgggagagcatcttggtgtggacagccggagcgtgcatgcatttatcatcggggagcatggtgacagtgagatcgcggcatggagcagtgcaaatgtatccggaatcccgttaaatacattctgcgagatgcgcggacatttcaatcatgatgactcgatggaacgcattgctgcaaatgtgcgcaacagtgcctatgagatcattgcaaagaaaaatgcgacctattatggaattgcgatgtctgtaaagaggatctgcgaggcaatcgtgcgcgatgaaaaatcgatccttccggtttccggtatgatccatggaatgtatggtgtggaggatgttgtcttaagtatgccggcgatcgttggaaaaaacggaattgagagacaggttccgatttctttagatgaggatgagcagaaacagcttcagaaatcagcgcagatcttaaaagagatggcagaacaggttttgtaatttttgaactccctttttacaaaagtgtgtctgatgcatattaactcataattatacgaaacaccacacttttattcattttctgttcatttcttactaatgggtattcatttttactctaggttgtcgtgcaatttattagaatggaatttttgaaagagccagcaccttgaatgggctgactctttcaatgtcacctgtaattaacaaactggaatttctcacttcttcattttaggtgcaataagcaacactactgtcacaagaaaatatacaccatacatcaaccatgtaatagtattgttccatggaaactcatttctggatgattcaatgcaaacattataaatacaatggctataatcagcatgatcaaatcgataatccttgatatactctttttcatgtaaatcaccttctcgtcaaattatagttatctacgtattccatcatcattaaaatgtttttttaaagctttctctgtcggataaattgatacaatcataataaagcattgaattgtcacaagaatcaaccctgcaaatccaatcgtattcttatcactatgatataacggaatatgtatcaaagcagatggtataatcattacccatccaattttccaccaaagtcttccgcagtagtcattcgcaaatttccatgtatccatatttttcattgagcgagttgttctgtagcctgacatactattcatatgttttggacaatgtttccacatcattcttccacaaatgaccatagcaataggaattatcagatcacatattaacataaaccaccaaaaccacataaaccgcacctctcttcacgcatcaatttgtgtaacagtagtctaacacatgttgataaaaagtactatatacaaactaatgtccgtgatttactttccataaaaagttcctttcaaaaataaattatattttctagagagatgagcaaaacgaattgatttaaaagttggatttggcagttagcttttgtaaatcggaaagaatgggaatttttgcatggatcgtgtttggcgtttttattatgctgtaccggttaaatctgaaagatgtatgttccatgcaaaaacgtatggaacaggggaaacaccggttgactttccgggaggaaatcggacagctccttgataagaaattttacatacttgtgctggcactgccggtactgggggtatgtgtatttaacattttaccgattgtatttatgatcctgatcgcatttacaaattatggcggggatattgtaccacctcaacagcattgaattattttgccggacttggtctggcattattactggataaagactgtgtaaaaggaaaagcattctggagggccggttaatcagcttattgcagcctgtgggaaaagtgccattggatttctggatctggatgcgaaatggagtgcaaggctgatcggactttttgtgaattgctggatcagcgttccatccatcatgttacttgcaactggaaatctttctaacagggatgtttctttatatgaagctgcaaagatcgacggggcaggcagatggaaacagttcgaaaaactgacaatgccttttatgctgttttccacgatgccggttttacttggacagtttatcggaaatttcaataactttggtattttttatttcctgagaggaggacacatttcaatgagtaaaaagtggaaattcggcagaatgatggatacaggcataacatatctgattctcaccgctgtagcatttgtgttttttttcccgtgtctctggctgatcctggcatcgttttcaaaatcgggaaccatttattcatttaacggttttttcccaaaagaatatagttttgcaagttttcagaaactttttactgatacgacactttacaactatccgagatggttttttaatacactttttgtggcagcgggaagctgtatattagggacatttcttgtgattttaactgcatatacaatgtcaagatttacatttgcagccagaaaaccaatgatgaaaatcacgatggtacttggaatgtttccatcttttatgggaatgatcgcagtttatcttctgatgacgcagtttaacctgatcaatcatttgtggggcttaatcttgatttatgctgcaggtgcaccgatggggtatctgacacagaagggtttttttgatacgatcccaaaagcaattgatgaggcggcaaggattgacggtgcaacaaattttcaggtgtttacaaggattaatctgccattatcaaaaccgatcattgtatatactgtgttgacatcttttacatggccgtggagcgattttattttaccgaaacttctgctgaaagaaaaagatctttacaccgttgcagttggactgatgagcttagatgaaacggagtttgcaagattcgcagccggaagtgtttttattgcagttccaatcgttatcctatatttctttcttgtaaaaaatatggtgaacggcatggcgcagggagcggtaaaaggttagatacggtttacaatcagttattgttgaatccgttttttcatgttaaaatgggcgcaggcattgcaatgacatttcctgagcagtttaagggatgacaagacttttcggaagaaagtgcctgtgacaggatgtttacgaaagaaaacggaggaacggtatgagcagaggaattgcgggaaaaaataactgggcattgtttttacttttgctggcagggatcgtacttggaggttttatcgggagccttgcggcgggagtgccgtttttaagctggcttaattatggacagacatttggatttgcaaatccgatcgtgctggatcttggaatcctggtcattacattcggactcagtatcaagattacgatcgcaagcattataggtgtattgatcgcaattattatttatcggtttttataaaaaataaaagtttaaaatgcaggtgcagatggggcgcctgcattttttaatgccagatgattgttcatcaaaacggactgtgttatagtaataaaaaatatcacaaggggggaattcgggtgaaaaaattattattaaagaatgcagtgatgctggcagtcgttatattctgcattggttccgtcaactgttatgcagccaccagtacggggatcaatgtcaattatcacagccagaaggaaattaaggattacctgaaaagtaaaaaggtaaatattgacgcagagacgacctacagtaagaaggcatcggatgtaaagccgtatcaggcgggtacgatcagtgagagcagtcagaaatcagcattaaataccatgaatgcgatccgttatattgcaggaattgatgcagtggggcttgattcttcttataccaaaatggaacaggcggcagctttggttaactcagtaaatggaaccttatcacattttccatcaaaaccggcaggaatggacgacagcctttatcaactgggggcatccggtgcatccagtggcaatctttcctatgcaagctggaaatgcggacttgggtatcatctggtaaaagcatggatgaatgatggtgacgcctacaatatagaccgcgtcggacacagaagatggattttaaatccgccgatggaaaaaacaggatttggctgggtatatggatcacatggaacttatgcggcgatgtatgcatttgacaactggtatgaaccgacggattattatggtgtggcatggccggcccagaatatgccggtagagttttttggcagcagttatccatggagcatcagcatggggaaagatgtggacaaatctgctgtaaaagtgactctcataaggcagtcggatcagaaaaaatgggctttttcagaaaagaaagccgatggctattttaacgtggaaaacagtaattatggacagaaaggatgcattattttccgtccggacaatctgagttatcagccgggagatacatttgaagtaaaaattacaggacttgaccagaaagtatcttatacagtgaaattcttttccataaacagtgcggcagagtcagatgaaaagcagaaagaatcgaagatcacggcgaaaaacatcacaaaaaccttcagcaccacaacattttccatcaatgcgaaaacgaatggaaaaggaaaaatgacgtataaggttgcggacgaaaaaatcgccgctgtaagtaaaaaaggtgtagttacacttaaaaattatggagagacaaaaattaagatccgtgtagctgcaagtggtaattataaggcggctgaaaagacgatcacgttgacggtaaagccggtaaaagcaaaaacgggttcgctgaaatcgactgcaaagggcagttttgcgttaaagtggaaacaggataagaaggcgaccggctatatcatacaatattctaccgataaacgttttgagaagaatgtgaaaagcacaacagtttcaagtaacaggacgacatcgaagaagattggaaagctgaaagccggtaaaaaatattatgtcagaatctgttcctataaaaaatccggtggaaagaatataaaaggcgcttacagtgacgtaaaaaccgtaataacaaaaaaatagacaagaaaacgatacttagatgatataaaattttttgtggaaaatgaataattgaacctgaaatcctgcaaaaaatgccttgttacactttgaaactttaataatttagtgaaataaagaaaaaaatattgcacatggattcattttataataaaataagtgtgtcaaaacgaaaccagcgggagaaccgttaggagcatgcagtgtaaagcacattgtatggagtatatactaaattaagtaaggagagattgtaaaatgggatacgttgatgaagtactcgaagtagtaaagaaaaaaaatgcagatcagcctgaatttttacaggcagtaacagaggttcttgattccttaagacctgttattgatgcaaatgaagagttatacagaaagaatgcaatcttagagagaattacagagccggatcgtcagatcatgttccgcgttccatgggtagacgacaatggacaggtacaggtaaacagaggattccgtgtacagtttaacaatgcgatcggaccgtacaagggcggcttaagacttcatccgtctgtaaaccttggtatcatcaaattcttaggatttgagcagattttcaaaaactcacttacgacacttccaatcggtggtggtaaaggtggttctgatttcgatcctaagggcaaatcagacagagagatcatggcattctgccagagctttatgacagagctgtcaaaatacatcggagcagatgttgacgtacctgccggagatatcggaacaggtgcaagagagatcggtttcatgttcggtcagtataagagaatccgtggttccttcgagggagttcttacaggaaaaggacttacttatggtggatctcttgcccgtacacaggctaccggatatggtctgttatacctgacaaacgcattatggaaagatcacggcatgagtcttgaaggcaagacagccgcagtttccggatctggtaacgtagctatctacgcaatcgagaaagcacagcagttaggcgttaaagttgtaacatgttctgattctacaggctggatctatgatccggaaggaatcgatgttgcattattaaaagaagtaaaagaagtaaaacgtgcacgtctgacagagtacgcagctgcaaaatcatctgcagagtatcatgcaaaacagaatggtgagcacggtgtatggcagtacaaagtagatttagctcttccatgtgctacacagaacgagttagaccttgaggatgctaagatgttagttgcaaacggtgttacttccgtaacagagggtgctaacatgcctacaacactggaagctaccaaatacttacaggagaaaggtgttctctttgtaggtggtaaagctgccaatgccggtggtgttgctacatctgcacttgagatgagccagaactccgagagactttcctggacattcgaagaagttgatggaaaactcaaaggaatcatggagacgatctacgctaacatttctgacgctgcaaagagatacaatgcaactgttggtggacagactgactatgttgccggtgcaaatattgccggatttgagaaggttgtagatgctatgctggctcagggtgtttgctaattaagaatttctaagataatataagatatggttaagtcctgtaaacccagtgtttatgggacttttctttatgtattgataaggcaaaagaattgtcagaatattcataaatagaagataatttacgttattttgaggtcgttatatacacgcggtacacaagtgatatacaggtggtatacactcgtttttactgattttgaatgcttttggaagcatttcatcctttgcttttcaagatgatttaggctgaacataagtgtgacgttaaataaaagaaatatcataagtgtatccagcaatcagtcttgatttattgttttatatcttgttcacttctgtaagaagttcttctaaagtcttatgggtgtacgttcccttggtggtgtcgtttttcatactgtgtcccataatcagtttgatacatacgtcatttgctccggcgctgtccataagtgcagcaaaggtgtgtctgccatcgtggggcaggtgtttcattttgagttttcccatgcacgtgttaaaattgccattcatgtaggttccgtaggtgta

SEQ ID NO: 5145 - DNA, 65346 bp, Unknown
  gut microbiota DNA sequence
actagatgagcagtttgcaaagcaacaagcagatattggatggagagttgaacagggatgggcaatagataaagatggaaatattagttcatgggcaataggacataaagattcaaaagtaaaatcctttctccagaatatgagtgaaaaagccgaagaaatcctacagaagcagttggaaaaagcaaaggatacaaaggaagaaaaagaagtattctcgatgaaaaagcataaagaagttataaaaaagaacaaggttgatttgaaggtgtaaataatcagattcgaagtattatgcagaaaaaatgcatagcattgagggagccttgcgtatgtcagatgaaatcaatgctcagttcggatttgaaagagtattcggtaagactaacggcaatgcagatactgatacaaaaattacaaaatttggcatctcttttaatagtgacggaattacaacttctatgcagagttagaaaaatcatcagccagtcagaaagaatatcttgaaaaaattcaggaaaagaaagctgctgagaagaaagagataaagaaaaaggaacaatccaagcaaatcgaagtacgaaaaactacggttcaggcaaattcaaaagaagaacttttggataagatcaaaaacgttgactgggattccatcaagtcggaggagaataaaatcggcggaagatttgatttttcagtttagtttattcagatgagaatagaagcaatttcataaaatcttacatacacacttgacaatattccgccgagcgcggcgtcggtgaaggggttcgcacctgtggtgtgccaacagaggtatcgcggatgcactcatggaaaaaatgacacctttaataatgaagaatagtgtacagaaatagcaaatgctgtgaaatcaatggtgtaaatatcagaaataaggaagctaaaagttgggcggcagattagttaataatttgccgcctatatacatttcactcctttataccgatacatcaatagaattatgaacgagtctgttaccattttggacaagtgtagcttctacggattctcttgtgacattatcaagaatgcttgtatcaaatgcttgtccgggcttccaatttggattggctgattttacggctgcgtacatagcagctctgtactgtccttcatattgttctaaagtccatgtaccacttaaacgcttatctttgctgacgctcaactgataatctttgaaaatatcggaacgctttgttgtgtcaccatttgaaagacctttttcctgaataaattcccacttcacattatcaaacattttttgacgatgctcttcggatacatttgtaagcttctgccatgatgtaccttttccagtaacatccatacctgcaacaccatttgaatttaataaatctccgtccgaatcaaactgcttcatcagatttttaataatcgtatcccttccaccgaatatttcatatatcatcttttcttccggagacatcatggattcatttgcaattactccagataaccagcctttttctttcaatgtcttatactgtttactatttgtattgatactattataggtattacctaaaccgttaatattcattgacatataaaagcctccctgcaaataaattcaaaatccgtttagaatcagtactatataatatatcgtcgcaaattccagaaaattaataacacagtatataatataaaatgcttttcccgatataattaggtaagatttatgattggaaatgaggaaaagcatgaacatatgactttatagaatgtgcgtataatcataaaaaatatggttataatacttgcgtataatcaaaaaacaatttacaatatgcgtataatcataaaatatagaacaaatatatatgcgcataatctggaggagctatgatattaaaaagaaaaatatataaaaaactactggaatggaaaaaggagtgtcaggggaaaaaagctttactgatagaaggcgccagacgtattggaaagtctaccatctgcgaagaatttggaaaaagcgaatacaaaagttttcttctgattgactttgctaaaaaagataaggaagttgaggggtattttgagaaatatctgaatgatctggatacattttttatgttattacagacacattttggaacaaaactgacagagagaaactctcttattatttttgatgaggtgcagatgtttccacaggcaagagcagcgataaaatatttagtggcagatggaagatatgattatatcgaaactggttcattgatatctatcagagaaaatgtaaagaacatcgtcataccgtcagaagaaagacatatcaatatgtatccattggattttgaagaatttgcaatagcattagaagaagatttgctggttgaatatataaaaaaatgctttgaaaaaagagaacctttggaaagaagtatgcataatcaggcaatgcttttgtttcatcagtatatgcttgttggtgggatgcctatgcctgtagtaacatttattgaaagcaaaaaagattttacagaagcggatagagaaaaaagggacattcttaaattgtatcgggaagatattatgaaaatagatgcaaagtatcgaagtaaggtacttgcaatttatgatcagattccgggatttctttcacagcatgaaaaaagagttgtattcaaaaagctgcaggatggtagttacgcagaccagtacgaagaaacttttttctggctgtcggattctatgatatccaatgagtgctttttgtgtaatgatccgaatgttggcttatcattaaatgagacaagaagctatgtaaagtgttatatgggtgataccggacttttggtaagccatgcatttgatgaaaatgaattacttgaagatgaagtatataaacagatattggcaggcaaattacagattaatgaaggaatgctttatgaaaatgcaatagctcagatgctggtggcaaatggacataaattatatttttatacacactataatgaaaataagcatcgaaatgatatggaaatagattttatcatttccaataacagcagattaaaatataagatgtttccgattgaagtgaagtcaggaaagcaatacaaaacgacctcattaaataatttcagagaaaaatacaaggagcgcataggggaaagttatattattcatccaagaaatttaattgtaaaagatggaattatatgcattcccccatatatgacgatgaatatataaaaatctgacatacacaccaagttttggagaggatggcattatcagtaaaagattccagaatggcaaggaactggaattcgcaggctcgaaagatttctggaaaaaaattttaaatgaatcataataatttacggatctttgacggcggcatcccaaaccgttttttaaacagcttgctgaaatgatagacatcatcatagccgacttcggctgcaacttcctggatgctgccgtcaaagccgttttccaacaattcttttgctttttcaaggcggatattgatcaggtggcggatcggtgtatcgcctgtctcacttttaaaaatacgtgagatataaaaaggacttaagtacatattctccgcgatctggtctaaagaaatcttttcactgtaatgatcctcaaaataatttacgatctggtcaactacatattttttgctggtagattcaaaagagcagccggtattgatttttaccggttcactctgttcccgcagcagcaggatcagcatctgcatcagataacttttcaacatgatataacgtccgctgcggcagacgtcattttctacgctcatggctgtgcagatcttaaacagcttctggcgcagttcgccggaggtatgtaaaataggagactgtgtggctggatcggatgtcagatcttttaaatgcagcggcagataattttccgggaaatccccaaaacggacgtcacataatccaacaaaaaattccgtagccggattggaagggtctgtgcagagtgcctgatgcttctgccccggatttaaaataatgatatctccttcggacacatcatagagcctgtccgcaatcttgtatttgccgtggccggacaaaataaatgccatctcgataaaatcgtggctgtgatagcgtgcttcatctttcaaacgtgtgcctttccaggtaaatagaaaagttggattcagttggtcaagcagttgttcccggttgtcacagcacatagtaaggtctccatttcttcattttatcgtcgataaaaacatattgtctatatttaaaatacaatgcgatgtggatcataaaaagtgtttcaaagtctaaatacactttttttatccacatcacagtataacatattctccaccagaaaccatcccctccgttgcaaaaaataacatgaacggtgcaagatagtacattcctttttaccccagaagtactatactgaaaatccgaaaggaaaaacgaaaatggagtaggagggttattatgacaccaatgaagtggttcttttcatttctgaaaaagtaccggagattaatgatagttggaattttgctgaccacagcggtatcagtgctttcggtggtaaatccgtacatatccgggcagatcgtagatcaggtcataagcggtggaaaatatgacagactgatgccgtttatcggatgtctgatcggagtcacgatcgtgatgggagtcttgcgttttctgtttcaggtcgcatttgagacggcgtcgcagggcgttttgtacgatatgagagacaaagtctaccggaaattattagaggaagattttgcattttacaataagaaacgtaccggagacctgatgagccggcagaccggagatatggatgcgatccgtcattttgtggcgtatgtggtctacatggtttatcagagtgtgctgatgtttgtgtttgcactgcttatgatctttacggtcaacacgaaactggcacttgccatgcttgtggttctgccgtttacggcgtttgcaacctgccgtcagacgaaagaggtacgtccggcattcaagcgtaaccgtgactgtttttcctcactcaatgcgtttgtgcaggaaaatgtcagtggaaaccgtgtggtaaaagcatttgcaaaagaagattttgagattgaaaaattcaataaggaaaatgataaattccgtgcggcgcagatcgatgcgtcaaagatctggatgaaatatgtgccgatatttgaggtgctttcctatgcgctgacgatcatcctgatcctctacggcggctatatggtcattcagggagagatcacgttaggacagctcgtgacggtgaacggctatctgtggatgttaaacaacccgctgcgccaggcaggatggctggtcaacgatatcagcaactttacaacgtccgtggagaaaatctatgcgacttacagtgaagagccgcatgtaaaaacaccggtatctggagtagtgaagaaacatctgaaaggtgagatcgagtttaaaaatgtatcttaccgtgcggatgacgaagatattgtcatggatgtcaattttaaggtaaaaccggggcagaccgtcggcatcattggttctaccggagctggaaaatcaacgatcatgaatctgctctgccggttttatgatacgacttccggtgaagtgcttgtggatggtgtgaatgtccgcgacatggatctttataacctgcgtgacaatatcggcatggcgatgcaggatgtgttccttttttcggatacgatcgaaggaaatatcgcatacggaaggccgaattgttcgttcgaagaagtcaaacaggctgcgatcatggcggatgccaatcattttatccaggcactttcggatggatatgatacgattgtgggtgagcgcggtgtcggactttccggcggacagaaacagcgtatctcccttgcgagggcactgctgaaagatccgtcgattctgattcttgacgatacgacatcggcggtcgatatggagacggagagttatatccagagccagttgaagaaattagataacaagtgcacgatctttgtcattgcgtaccgcatttcttccattagagatgcagatctgatccttgtcatggataacggacgcatcattgaacagggaacacatgagcagttagtggcggcgggaggttattacgcgacggctttccataaccagtatggcgagatcccacaggaaattttaaacggaaagggggagaaataagatggcaagaaacagatatgatatggatgagatattagaggacagttttgatgtaaaccagctcaaacgtcttgcgggttacattgctccctacaaaaagaagatggcaggcgttattcttctgatgctttcttcctcggcacttaccatggcgatcccgatctttttccagaatgtgatggatcacagcatcccggaaaaagatatgaaatcgatcacattttacagtattgcgacattgctgatcgcactttattcgggtatttccctgcggatcaagatcaagaccatgagtgtgatcgggcagaatatcgtacatgacatccgctacgatattttctgtcatctgcaggaacttccattttcctattatgatgacagaccacatggaaaaattcaggtgcgtgtggtcaattatgtgaacagcctaagtgatcttttgagcaatggtattgtcaacacattcacagatctgtgcaacctgatctttattctgatgtttatgtttgcactcgatgtccggctgacgctgatctgtctgtgcggattgccggttcttgcatttgtgattatcttaatcaagaaaaaacagcgcagggcatggcagatccagagcaacaaacagtcaaacttaaatgcgtacattgcggagagtatcaatggaatccgtgtgacgcagtcttttgtaagggaaaatgagaataccggaatctttaataacctaagtaaaaattaccggaaatcctggatgcgtgcggtaatgtttaactttacgatgggaccgagcgtggatattatttcgacatttacgacggcactgatctatgtgctgggtgtccgttggattttagcaccggatatgacactgaccgtcggtgttctgatcgcatttaccgcgtacattgggcgtttctgggcaccaatcaacacacttgccggattttacaattctcttttgacagcaatctcttatcttgagaggatttttgagacgatcgatgagccggtgggtgtcagggatgagccggatgcaatcccgatgccggaggtggcaggagaagtgaagttttcccatgtgtcctttggttatgagccggggcagaagattttggaggatatcaattttacggcaaaaccgggtgaaacgtatgcgatcgtcggcccgaccggggcaggaaaatccacgatcgtaaatctcatcagccgtttttacaatgtggattccgggaaaatcacgatcgatggcattgatatctcgaaggtgacacttcattcactgcgcacccagatgggaatcatgatgcaggacagctttatttttgcggggacgatcatggataatatccgctatggcaaccgcagtgcgacggacgaggaagtcatccgtgccgcaaaaacagtctgcgcccatgattttattatggaaatggaaaacggatataagacacaagtcaatgagagaggaagcaggctatccgccggacagcggcagcttatttcctttgcaagggcactgcttgccgatccgaagatcctgattttagatgaggcgacttcgagcattgataccgagacggaactgcttttgcagaaaggattgaacgaacttttgaaggggcggacttcttttatcattgcacacagactttctacgatcaaaaatgcagactgcatcttatatgtggataaaggcgatattttagagcgtggaaatcatgacgaactgatggaacagaagggtgagtattataaactttatatgtcacagtatgatttcttaaaatgacaggcaatgcggtgccatttgccaatcgaaaaacttaaagccagcgtttgacactcggatcttataaataaaaactgccgcctcacggtgatatgcccccctttttctgaacttacagagaaaagggtacatatattcacccggagacggctgtttttatgaaagtttattcagttttatgttctttccggtattctgccgggctttttccaacgtattttttgaacttgatatggaaataatcgacattccggtaaccgactttttctgcgatcgcataaacttttaactctgaggaacagagaagctccatcgagtgtttgatgcggacatggtcgacgtatgagttgaagttttcacccatctttttgcggaaaatctttccgagataggagctgttgtaaccaaacagcggtgcaatattttctaatgtgatattgcttgcatagttgtggttgatgtagtgcagaatatcatccagcacgctttcacgggaagagttaccgatcgaggacatgatcatctcaaactgttccgtaaagtacaggatgatctcgtagagataatatttttcttcgatcagacggatgatatccgcattgctcggaaacgggatatttgtaccattgtaaagccggtttgcctgttccttgatctgcagataaaggtctgtcaggaaaagccgtatggaatcaatcgaatctgcagcatggtaaagttcattggtaagctgtgtcaaagtctccgctaacatattgcggttgaatgcctgaagatattcaaacaggctggtagcgtaacggtttaaaaaagcgtcgtttaagatggattttaaactgtccgggtccggcagttcggcataaccgatcgtgtgctgttcctgctcgcagaagaaacggcgttctaacagctgtttcgcctgaatataggaaatatagacttccgacaggtctgacacacgcgcaccatatgtaataaagagactgtcaagaggagaattctcctgtggacgccgttctctccggtaacgctccagaaaatcattaaatttttgaatggcaaaagtgcctttcagtaaaataacctcatgatattgcagcgtaatgttatcataggagttattatcctgatttgtcacgcgcagaagatccgaaaaacgataggaggcatctgcagtattgtgactgtatttctcatagatcacaacctgataggtgtctgctgtcagatggagatctgttgtatttatgtgggaaagatcgatattattcgttaaaagatcgcggatgatggtctctcttgccttttcacggtaatgttcccgggtatttgcagttgcagcatccttgtctaagttttctttgatcgaacgaagaatctcctcaagttcatcctcgtcgatcggctttgtcagataatactgcactccgtaacggatggcttcctgcgcatatttgaaatcagagtaaccgcttaagataatgacttttccggtaaaaccctgtgctcttgcctcccggataacgtcaagccctgacattcccggcatgcggatgtctaagagaacgatatccggctgtaaggcaagaatctgctgataggcggtctcaccgtttgcagcttctccggcgatcgtatagccgagagattcccagtcgaacagacatttgataccttcccggataatggattcatcatctgcaattaaaacgcgatacataaaaataaccttcctgttccaatgataaaagtactaaacgtaagtataaatgcgaacgttttgtttgtcaaatttatcgagtgttttatgtacaatttagagggtattttttgcagggtgggtatagtaagatgagacaaaatgagataattacagggaggaaaatcctctgcgcctgcaagaggcaaatgctataaaaaacatagcatgcatttttctccggaaaacagggaggattatcatatgaaattcagtaatggatgctggctgcagaaagagcgctgcgagtgcttttctccggcagaagtatatttttcaaaaatcgagaaagatcaggtgacgatctgtgcgccgacaagcaagatcacacagcgcggcgatacccttggcggaatcaacctcacgatcgtgatttcagcaccgtatgaggaagtgcttagggttcagacttatcatcacatgggcgtgcagaaaaaggcaccgtcatttgagatcgcacctgcggagagcggacatttaaaggcagaagatacggaggacaagctggtcatttcaagcggtacactgcgtctggaagtgcagaaagagaacggagcactcacattttaccgcggtgaggagaaaatcactgcaagcggatggagagatcttgcatacatgaagaccgactggaaaggttttgcctatgataaaggaccggaagatgcttatatgagagagcagttatcactttccgttggcgagctgatctatggacttggcgagcgtttttctgcatttgtaaaaaatggacagagcgtggatatctggaacgaggacggcggtacttccacagagcagtcttataaaaatatcccgttttatatttccaataaaggatacggtgtgtttgtaaaccatccggagcgcgtgtcctttgaagttgcaacagagatggtaaccaaggttgaattttccgtaccgggtgaaaaccttgactatttcctgatcaacgggccgacgatgaaagaagtgctgatgcgctatacagatatcactggaaaaccgtcacttccggcaccgtggacattcggtctctggctgtccacatcctttacgacaaattatgatgaaaagacagtcaacagttttgtcgatggaatgtttgaccgcaagatcccgttatccgtattccattttgactgcttctggatgaaagatttcaactggtgtgattttacctgggattcaagagtattcccggacccggagggcatgttaaaacgtctgaaagcaaaaggattaaagatctgtgtctggatcaacagctatgtgggacaggagtcctccatgttcaaagagggtgtcgagggcggttacttcttaaaacgtccaaatggcgatgtatggcagtgggatatgtggcagccgggacttgccattgtggactttactaaccctgcagcctgcgagtggtacagcaaaaagttagaggcactgctcgatatgggtgttgactgcttcaaaacagattttggtgagagaatcccgacggatgcggtatattacgacggttctgatccggtcaagatgcacaactactatacatacctttacaataaggtggtatttaacgtattaaagaagaaaaaaggtgaaaaagaggctgttctttttgcacgttctgcaactgcaggcggacagaagttcccggttcactggggcggtgactgctggtctgattatgaatccatggaggagagccttcgcggaggcctgtcactgacaagttccggttttggatactggagccatgatatcggaggatttgagagtacctccacaccggatgtctataagagatggtgtgcattcggactgctttcttcccattcaagactgcacggatctacttcttaccgtgtgccgtgggcatatgatgaggaagcagtagatgtggtacgttatttcgcacagcttaaggcatccttaatgccgtatctgtaccgcaatgcgatcgagacatcaaagaccggtatcccgatgatgcggagcatggtgcttgaatttaccgaggacaagaactgtgcttacctggcaacccagtatatgttaggtgattccttactggctgcaccaatcttccgtgatgacagcatcgcagagtactatctgccggagggaacctggacatccttactgaccggagaagtcaaagagggtggtaaatggtatacagaaaaacatggttatttaagcattcctctctatgtcaaagagggcagcatcgtggctatgggagcaagaaatgataatgcagtttatgactatgcagatggtgtgacattccgtgcatatgcattaaaagatggcatcaaggcagaaactgtcgtatatggaacggaaaatgaaaaagaagcatctgcaaatgttgtaaagaacggatcttcttatcagatcgcggtagagagtaataaggcatccaaagtggcattgatgaacgttggcactccaaagcaggtaaccggtgcattctatacacaggatggggaaaatgtcatcgtagcatttgacggggacggcaaggctgaggttgtattttaatgcaggaaacatacattgaagaaattttaaaagagctgactttagaagaaaaaatcggtatgatccacggtgcgggtttattccgcaccgaaggagtggagcggctttccatcccaccgctctatatgtcggatggaccgatgggagtgcgcgcagaatttgcggacaatgaatggcggaatgtcgggacgacggaagattatgtgacttatcttccgtgcaacagcgccattgcatccacctggaatcgtgcgctggcaaagaaagccggagaagtgctgggcgaggaggcaagaggcaggggcaaagatgtgatcttagctccgggcatcaacatcaagcggagtccgctctgtggcaggaattttgaatatatgagcgaagatccgggactcatcgaagaactggttgtaccgatgatcgagggaatccaggaaaacgatgttgcggcatgcgtgaaacattttgcggcaaactcacaggaaaccgaaagactctgggtggatacaatcatcgatgagacagcactggaagaaatttattttccgggatttcaagcggcggtagaaaagggacacacccttgctctgatgggagcctataatctgttaaacggtgagcactgctgtatgagtaagtccctgctcaacgagaagctgcggaaagactggtcatttgacggtgtggtaatctccgactggggtgctgtgcatgatacgaaactggcggcagagtccgggctggatcttgagatggatgtcaagtatcagttcgacgaacagtacatggcagatcctctgttaaaagcagtgaaggatggagaaatcgaagaatcgctggtggatgagaaagtgcgcaatatcctccgcatgatgctgcgtttaaaaatgatcggaccggagagaaaacatcgtaagacaggcgcatacaatacggaggaacaccgcagggcagtgctcgatgtggcgcgcgagtccattcgaacgggggaggaagtgcagaaatcaaggcactgtatgagatatcaccgcttatgggaatcaaaaagttacttggtggaaatgtgaaagtttcttacgcaccgggctatgtgattccggataagaaagaggcatctgagatcaactggcaggcggcgagcacggagactgcagaggataccgaaaaggaaagcactgtaagtggaagagcactggatgaaaaacagcaggaagccttagcggaagcagttgcgctggcaaaagcaagtgacattgttatttttgtgggcggactgaaccacgattttgatgtggagggacttgaccgcgtgaacatgaaactgccatacgggcaggatgaagtaatcgatgctctgctaaaggccgtgccggatacggtggtctgcatgtatgcaggtgcaccggttgagatgccgtgggcagaaaaggcaaaagcaatcctctggagctactatgccggtatggaagggggaacagccctggcagagatcttgtctggaaaagtaaatccatccggaaagctggcagaaacatttatccgtgatgcgtcgcagtgtccggcacatacgatcggaacatttggaaagaaagaccgtgtggagtacagggaaggtgtgatggtcggttaccgttattatgacacaaaaaaaacagatgtcctgttcccgtttgggcatggattttcctatacgtcatttacttatgatgatcttgaaattataaaacagcaggaaaatggcagacagaccgtgaaagtttcctgttcggtaaccaatacaggaaaatgtgcagggaaagagaccattcagatttatgtggcaccggaacagaaaaaagacagaccggttcatgaactgaaagcgtttgaaaaagtcaggcttgatgccggggaaacaaagaggatctgtgttattttggaggaaagagatttttcccgttatgacacagacaaaaagatgccggttccggtaaatggaacgtatgaaattcaggttggcgcatcttcgacagatatctgcctttgtggaaaaatcgaccttttttttgcagaaggttaaatgatgactattgaaaagaaactctgactttgctatgataaagtcaggttttttttatgggattttttgggggcggataggtgagaatatgtctgaaaagagcaaggtattagtcgtagatgataaacaggtcgaacgtgtcatgatgaaaagaattttgagcggtacgtacgaggtgatagaggcagaaaatggcaaggaagcatttgagattctttatgaacgaagcacggagataacggcggtacttttagatatcgttatgccggagtatgacgggtattattttctggaacggtatcataaagcgcagatgtatcaggcaatacctgtcattgtacttacgatggaggttgacattgagacagagattaaatgcctgggcatgggagcatgggattttatccggaaaccgtatgatgcggatgttgtccggttccggctgaagaatgtgattggcagcagcagtcagaatatcagcaaagcgttaaagtaccgtgcagaatatgatatccttaccggaatctataataagacccatatgtttcaggcgacatctgctatgttagagcgatatccggaccggcattttgcttttgtgcggatggatattgaaaagttccagctgatcaattctttctttggaatgagtgcaggggacgagctgctgaaatatattgcagaccttttgatatgtgcagtcagaaaccgcagtgacgttacctttggcaggatggatgcggatatattctgcttctgcgtatcctatgaaaatacaaaagaactggtcgaaagttttgataaaatgcgtgatatcttaagcagatacccgcttgattttgatatcgtaccgatatttggtgtttacctgatcgctggaaagaaaataacaccggatcacatgtacgatcgtgccaaccttgcggcaaagcactgcaaaggcaattatatccgtaactatgcattttatacacggcagatgagccaggagatcgagaaggaacagcggatcgtaaacagcatgaaaagtgcactggaaaatcatgaatttgttgtattctatcagcccaaatactggctcagcgataatcagatcgcgggagcggaggcgctggttcgctggaaacatccggaacggggaatgatttcaccgggagagtttataccggtatttgaacggaatggatttatcacaaagctggattattatgtgtgggagcagacctgcatccagcttagaaagtggatggatgaaggaaagaatccgcttccgatatccgtcaatctttcgagggtcagcctttacaacaaagatatcgtgaatgtgatctgcaatctggtggacagttaccggattccacgcagactgtttcaggtagaactgacagagagcgcatacaatacaaatcccaaagcagtgcaggatatgatgcagcgtttgcgcgaagagggattttacattctgatggacgattttggaagtggttattcttctttaaatgttttaaaggatattgtggttgatgttttaaagatggacatgaagttttttgccggtgatgacagggaaggacgcggagaaaatatcatggcggcagtgatccgtatggcaaaatggctgaatatgccggttgttgcggaaggcgtggaacggatcgaacaggtggaatttttgcggagtattggctgtgaatatgtacagggatattattttgcaaaaccgatgcctgtggaagaatacgaaaaactgcagtttgacagaccgcatgcggagagaaagaaagagacagaacgcttagttgatatagatagcctgtggacgccggcctcccagctggagtcactctttttaaatgcgaaacagggtgtggctgtctatgagtacggcaaagaacagattgagataatacgcgtaaataatgcgtattatgaggtgtttggatatcaggatatcagtcagaaaaaggatatttttcagggaattccaaaacgatatcataagcgtattctggatgcctttttttatacagcagataaaggacgtgaaacacaatgtgaattttccaggaagaatgaagcaggagaagaaatttttatatcattaaagctgtatgatgtaggaattgtaggaaataaacatatcatatatggtgttttcttaaatgtgacagaaccaaaacaactggaatgggaattagaaaaatacaggctgttattatccggaaaaacgaaagacagggagatggaacaggaaaaagaacaatcggaggaatgatagaaaaatgtgtgaggtattggaaaaattaagagcatggggatgcgatttagatggagctttagagcgttttttaggagatgaggaattatataaaagctgccttccgatggtggcagaggacgaggcttttgatggattaaaagaggcacttgcagaagatgagagaaaaaaggcgtttgactgtgcacatactttaaaaggtgtctttgccaatatgggaatcacaccgatgtttgatacggtcgaaaaaattgtagagccgcttcgtgccggaataaatgatggactgatgccggtatatgaggaattgtccagggaaagagaacatcttagaagcattatccggatcgagggagaataagacgcgtgaagatttatatgacggatattgttccatttggggatgaaaagatatttgcacagatgctgccttttatcacggaagaccggaaaaataaaataatgcaattgaaaaaaaaagaagaccggtgcagatctttagcagcaggattattgttagagtatgccctgagggaatatggaatcagtctgttaccagggaaaatgcagcagatgtatcttagattcggagagaaaggaaaaccggtattaaatggaaaaaccggtatacattttaacctgtcacattcgggaagatatgtggcaggtgttttttcagatgaagaagttggaattgatgtggaacagatccggaaaggacagatgaaagtggcagaacgttttttctgtccggaggaatatctggcattacaaaagggaaaaatgaaaaaagcagactgttattttacagagttatggacaagaaaagaaagttatatcaaagcggttggaaaagggatagcattggatcttgcatcgttttgtgtactgcaggatcaggttaaatttttaaaagcggggcagacgggagaatggtatctgcaaagctatgatcccgcaagtggatatatattgtcagtatgtgcgaaaaaatgtacaaaatgcgaaattcaatggatcagtaaagagatgtttacacagaaatttatttgacggaaaactggaaagaatttataataatcgctgaaatgacaagtaaggaggaagattcatgtacgacgaattgaccgaacaggatataaaaaagatggaagaggagattgagtaccggaaacttgtggtgcgcaaagaggccttagaggcagtgaaggaggcaagagcgcagggagacttaagtgagaatttcgagtaccatgcggcaaagaaagataagaaccagaatgagagccgtatccgctatttagagagaatgatcaaaacagcaaaagtgatttcaacggattctgcagaggatgaagttggtatgaataatacggtgacggtttattttgaggaggacgacgaggaagaggtttataagatcgtgacaacagtccgcggtaattctttaaaaaatttaatcagcaatgagtcaccgcttggaaaggcattgcttggacataaggttggtgaccgcgtggaagtggctgtcaatgagaattattcttattatgtcgtaatacggaagatcgagaataccgtggatgacggttccgataaaataagacgcttttagcagaaagagggatttatgagacttacagaattattaaatacagagaatgtaacgatttcctgtgaactgttcccgccgaaacagggtgcacagttagacaactacaaaaagattgtcggtgatatggcagcattgaaaccagcatatatgagtgttacttatggtgcaaccggcggaacttctgattatacggtagaacttgcaaatgaagtgagaaatgtgaatcatattccggcactggcacatctcacctgtgcatcttcgactaaggagaaagttgcctctgtgattcaggagttaaaagaaaagcagattgaaaatgtacttgcactgcgcggagatatcccgcagaatgcggatttcccgctgccaaatcagtataaacatgcaagtgagctgatctatgatatcaaatcacagggagatttctgtatcggcggagcctgctatccggaaggacatcctgagtcacagacattagaggaagatctgatccatctgaaagaaaaagtggatgccggatgtgagttcctcacaacacagatgttctttgacaataatattctttataactttatgtacaaagcactaaaacatggaatcgatgttcctgtcgtagcaggaattatgccgatcaccaacgcaaaccaggtaaaacggagcattgccctgtccggaagtttggtaccgcgccgtttccttgcaatcgttgaccgttttggaagtgacccggctgccatgaaacaggcaggtatcgcctacgcgacagaccagatcatcgatctgatcgcaaacggtgtcaaccatgtacatatttatacgatgaacaaaccggatgttgcaggagcgattcttgagaacctttcggatatttatgtgagggactagtacggctatttgtttccgggcaaaatatatagcttttatgaaaaaaataatatcattagctgcttagaaatggagattaatatgaaaaaacaggaagaaattttccatgagatccaggatatgatgggagagacaaaagagggaagaatccgctggagtgtagaggttcagactacggaggcaaatccggtagaagaaaaacccgttgagcatgaagatggattggattggacgattgatgagtgttatgtttcttattattgcaaatacaaaggaaaagatttctgtctgatcacttatgaaatgttaaagactgcaaacagcagcacaggagagcagaaagtaaaatccagcaatatggtatttttaccaccacttgggatgcgtttttttgatattcatgcgctgctgccatacagcatagaggtatcgaatgtattacttgatgcaatacaccgtctctgggtaatgctgcttgatatgtataaagtggacaagggcagtatctatttgaatgtaagacccggaacactcacgatcgaggatgaaaagaattgacaggaacgatttttacgtcatgatcatttaggggagaagaggtaatatctgttgaaaaaacaaaccaaaacagccatgaagctgtctgttattgctatgattgtgtctgcatttatgatgctggcagcctgcacagaaacagtgcagaaacaaaagatacctggtgcaacatatatgggagggaacaatacgattactgagatctgtaaagaacttgactctgcgggagctgctcatgtagatatatttcgggaatgggcggttgattttgcagattccgcaggaaaaaatgcgaagctggaagatacatggtcagatcctgggaaaatgaaagcggatatcggtaaatgtatggatggctgggaacagaatcatgattattcagatgcggactgtagaatgacagcttttcttctgttagatggggtgatccgctcggaattaacggaagatcattatgagggaacctatctgatgtttgacacagaagcgatagataatgtggacagatatgaaatcctaaaagagaacaaagacatgtttaccacactttatggtgaaaagagtgttacggatgacagacatccggaatctgcattttgcgacagctggaaagaatatggatttcaaatagacaatgacagaatatcacttcttagtatcgtaatatatgatccatattcggatgctgtttttgtaggtcatacaggtatcctgataaagtatagtgattattatttgtttgtagaaaagattgcatttgaacagccatatcaggcaaccagggtgcagacaattgatgaactgctcgatatcttgtccttaagaccggaatattttggagaagagggagaacccggaccatttgtttatcataatggagattatattggaacgttaaagaggacgacttaagaaagcataaggagaatgcagataaaagaaagttataccggtaatgggagagactttcagatacctgccgggaggtatctgaaagtccgggagtgaatgcaaatagaaccgttgggtatgatgtgccggttatgtacaaaagagtatcataaaagggttatttatttgagctgtctgcatcgattacagattggatctgtttcatcagagtatcatagttatcctgattatcgattccgccgagcatcggatcacccacgatgttaccatttctgtcgacgagtattgtggtaggaaatgccatgatattggaggcatatttgcctgcatctgaagatgaatcaatagaaagattgcggtatttagcaccttggctttcaagaacagaggcagcttctttgatagccgattcatttccatcgaaggtttctgtgttgatgccgactacttctcctcccattgccctgactgcatcatttaattcattcagtttggataactcagcaacacaaggcttgcagccggtaaaccagaaattgatgacagttactgcattttcggaaaaaagactttcgtcaacagaattaccatcgaaatcctgacctgagaaatttttgaatggtgatgcatcttcagaattagtattctgcccatttttatcggattctgtagtttctttttcaatttctgcgatctgttcttcgatttttcgtatggtttcaatatcatcagtaagtgttttgaattcgtcatcagtaaaagaatctttgtttgattcagcggtatcggccagataatcagcataatttccgtttgaatctgcagtgtttttattcatcagaccaaataatttgtcccatatatctttatgctctgcaaagatccggttctcctgctgatataaatcatccagctttgtgttggaattgtccgcagatgccgtgctgtcttcagccgtggtattctgtggttctgtggtgcttacagttccttttccgctgcaggatgtaagcagcagtgcgatgctgagtgtgacaactgaaataaatgtaatttttgttttcatggataattgctccttttttaaattgtaataagattgatagttactggtttatgactgctggttactgttgttctgttttttacatgatttccccataaactggtagtggatcgcatctttaggacaggcttttatacaggctccgcatcgtatgcattccggatgatctggagttttacacacatccacatccattttacatgccttttggcattgcccgcatccgatgcatctgctgttctcaattttaatagaaagaaagctgactttattaaataatgagtagattgctccaagaggacagatccatttacagaatggtctgtaaaacaaaatacttaacacaataactgtgattaaaataaggcatttaaaagaaaaaagttttcccagtgcagaacgtatagcggcatttccaagtgcgagagggatagctccttccaggacaccctgaggacaaatatatttacagaagaaaggatctcccattccgatagagttcgttaccagcatcggaagaagtataacaaaaatgatcaggatgatatattttaaatagcgcagcggtttgagccgggctgtagaaaatttttttccgggtattttatgaagtaaatcctgaaaccatccaaacggacacagaaaaccacatataaatcttccgagtgttacaccgagtaaaataaaaaatccggttatgtagtatgaaaatttaaatcctgatgaaccgacaaccgcctgaaaagctccaattgggcatgctccggttgccgcaggacaggagtaacaatttaatcctggtacacatacgttttttacgctgccctgatatattttacctttccataaattaggaatatggatattcgtaagcagcgtggcagctgcctgtatccatccgcgtagtacagctatattttttgatagaaaagtcttttttttatccaattccgacacactccagacataattttattgctttaccgagcacgacagctgcttctcctctgaccgcaccgtagcttatcatggtgatacctgagatgagcaggatcgactgatagatttttttgcacttcaagatattttactcctttcatttgttgtatttattgaccagctgatgttagtattatacaatagctgttgtaaaatttgtgttaagaagcgggtgaatgaattttgagattattgatagttgaagatgagaaacaaatgtgtgacatggttgcaaaacggctgtatgatgcagggtacgaggtggatacctgttatgatggggaagaggcttttgaaagtgtcctgacggaaaattatgatctgattgttctggatctgaatctgcccggtatggatggaatggagatcttaaaggaactcagacagagaaatgaggagacaaaggttcttatattatctgcaagagggcagattgcggataaggttgaaggactggatgcaggggcaaatgactatatggaaaaaccatttcatctgcaggaacttgaggcgcgtatcagaagtctgacaagaagaaaatttgtgcagaaagatgtgtgtctggaaagtggtgggataaagttcgatacggtaagacgtgaggcatatgcaaaagggaaaatgatttccttgacaagaaaagaaaatggcattttggaatatttacttctgaatcctggaagaccggtaagtcaggaggaattgatggaacatgtctgggatgcatccgtggatagctttagtggtgccatcagagtacacatgtcttcgcttaggaaaaagcttaaggctgaacttggatatgatccgattttaaacaaggtgggagagggatataaaatacgggaggagtctgaacgatgaaaagaatgtcactgcagtggaggcttacctgtatcattacggtatatattgctattatatgtggatgtctgacgatgtttgtctataaaaatggcgtgtattatatcgattccctgcaggagactgtggatgcccagggagaggataacggggagaatacggatgaaatatatatcagcattccagatgataagtgggatgagtttgccaatgatttttctatccaggcatataataataaggaagattacaaaaaaaacagtctgctgatatcagccatattggctcttattggcggggtagttacatattttataagtgggcatgcactcagaccaatccgtgaattttctgataaaattgaagaagtacaggcgcaaaatctggcagcttcacgaatagaagaaaataaagttaaagaattgaaccagcttagtatttcgtataataagatgcttgaacgtctctcggacgcatttgagatacagaggcaatttaccgcaaatgcagcacatgaactgcggacaccattatctttgatgcgggtacagcttgatctttataattctacacggcatccggataatgatgctgacacattgcagacaataaagatggttaccgagcagaatggaagactcagtaaaatggtaaaaacgctccttgatatgagtgaactccagactgtgggacgggatgatgaaattatggttgacgcgcttgttgatgaagtgttagcagatctggatcctcttgcacaggaaaaaaacataaaacttactggaaaatgtaaaaatataacgatggttggaagtgacattcttatttacaggctggtatacaatcttgttgagaatgccataaaatataatcattcgggcggacaggttacagtaactgcataccggaaggaaaaacatgtttatctgtccgtggaggatacgggaaacggaatccctgaggaactcagggaacgcgtgtttgaaccattctttcgtgtggataaatccagaagccgggaacttggcggtgtaggacttggacttgcgcttgtccgtgaaatcgtgagagtgcatgatggcagtattgcagtcagatcaaatccgtctggaggaacggtttttgatgtaatattaccactgtgatcgatcataacttattagttacatctggctgtctcgtgcctggggtatttaattcttttctattgaattatgcggatatctggttgtttttgtagtgtcgaatgtattgctgaaagttttgatgcaaatgaaagagaaagtccttaatcatgaggaaatgttaaatcattatctgatacgcggatttatggaactggtcatattccgtgtggaaaggcagtttccgaatgagatcaggaaagcagatgatgcaaaaagggagatcgtatcttcaaaagtaaaaatgaatctgatccatgaggctttttttacgatatttgcatggatggttgcatttttaaatatagggattatattttatgcatggaaaagcaaaaatctcacggcgggcgaagtggtggcactgatttcgctggtggaaaatgcgtatgtcccaatcgcaatattcaatgtgatctatgtgcaatataagctggataagtcagcttatgcaagatttgtccggtttttggagttaaaaaatgacgagcagctccagaaaggcaagattccggctggaaatgcaggtgagatctgtgtcaggaatcttcactttgaatatgaagaaaagacggccttggatgaggtggcatttgcaatcacaagaggacaaaaagttgccctggtcggtgagagcggttcaggaaagtcgacactgataaaaattcttttgggatttctaaagtatgacagaggtcagatcaaggttggaggagtggaactgagagatctatgccttgataagttctatgacaaaattgtttatttatcccaggattctccgatttttgatgggacgatcagagaaaatattttatttgacagaaatgtcccggacgatgagattatgatggcactggaaaaggtgaatctttcctgtctggttcgcgattctgccaagggactggatacgcagatcggtgaaaaaggcacgcgtctgtcgggcggagaaaaacagcggcttgcacttgcaagattgtggtttgaagatccggaacttgttattttggacgaagccacatcggcgcttgataatttaacagaagaggcagttatgcaggaagttcttgatcggttaaaagatcagacgatgatcgttattgcccacaggctgaattttattgcagcttttgataagatcattgtatttcggaatagtaaaattaccagtcaggggacttttgaggaactgatgaaatcagatccgtattttgcggaactttatcatacaagtagtcagatctgattgtctggatacatttgttgactggcaaaggaagagatttagaaacataaaatacgattttaaatttttgaagttgtccataggaaaaaactatggacaacttttattttgtgtgccgagcatggcgctaatcttgctggtgcaagtccagccatgggtatttaccgccaagcgtagtgaaccacaagtcggtatcggtaacggtatggatggaggaagtggtgtagcaaagttcttgagcctacgaacagaaacttgataaggcgattaggtgggtaagattgcaaatcaaatcgaagcccaaatggtaaacgtaaaccgaaattgtaaatcaatggaaaaagccgggaacaaaggtgcgtaacctaataaagatgtgggtaccagaagacttggcaagacaggctggaaacagttgccgaggatattggttcacgacacatgcagttgccataaatatggcaatgacaacagcaatttatgcaggaaaaacttgcattttgggaacaaacgtgtataataaagctgttataaaaaagaccatcacaaaagtgatgtggaaaacaaaaaaatggggtgctcgcacaggcgggctgagagtaagcgtacgctttaacccggaacctgatttggataatgccaacgtagggagataatggatcacaagtgtgtttttttgtgcaggaatctttggttgggttcctgcactttttatggataagacatctgcaaatgctggtttgtgggtgatatgagtttccctgtgtagggtggttctggggggttacgattggcaaatcgcatcaagccgggactgttttgttccgttgtacgaaaataaggcaagtctaagtcagcctgatttaatgtttctcggagtgatgtgtgcgtcttaaacgccccgtccgggggcattaagacttgtgctgccgtccgtggcagcacaacactgtgttacgaacaggcagactaagattgcctaattttctcccaaagtcacaaaacgaatcccggcttgatgcgatttgccagccactaagttgtgagccacccttagccgggaaactcattttacaaccttgggggtgcgtaaatttttgtgacattcattctaaaaatgtcgaaaaatctcgacgaaatctgttatatctatgcttttaaccatacatacttggaataataatctgcattattagtttggtaatttacgaaatgattaatgtaatgcaacatagcagatgaaacttcagacaagtcattaggctgaatatcagtgatacagcacactaggattttaagcatattctcattcgtgcgaatatcaaaaattcacacccgcgcccccagttttgagatgaaccgcccacccaaatggtgttcacaacctagaggtgggcatcttgcgcaaagctggagctgattttgtgactttgggagaaaattagaaaatcttggtgtgcctgtctacatacagtgatgttctgccacggatggcagaacaaggcagcatcgagtcatggatgactcgttgttgccgttcacgtcactccgagaaaatctaattcaggcatacctagacttttcttattttcggacaacggaaccaaaattactccggctttgcgcaagatgccactcacagacctgcgacacaccattgggacgggcggtttatttcataaacaaaccagcatttgaaggaccgtttattcatacatcacttgtgtcacagcggcagattgggggcaccaccttaggtcgctatataaaattaatgcaaaacaaaggaggcaaatcctctgctcctgcaagggcacatgctatgcaggcatagcagacattttgcttcgcaaaacaaaggaggcaaatcctctgctcctgcaagggcagtcgcattttgcttcgcaaaacaaggaggattctatgtacacagcattaacaatcgctggaagtgattccagtggaggcgccggcatccaggcagatattaagacaatgaccgcaaaccgcgtatacgcgatgagtgcgatcacggctctgactgcccagaatacgaccggcgtaacagatattatggaggtaactccgaaatttttggcagagcagctggatagtatttttacggatattcatccggatgcgatcaaaaccggaatggtctcgtcgagtgaactgatcgagacaattgcggaaaaactgacagagtatcatgcaaaaaatattgtggtggatcctgtcatggtggcaaccagcggggcaagactgatcagcgaggacgccatcagcacattgaaaagtaaattattgcctcttgcaactgttattactccgaatatcccggaagcagaagtgctttccgaaatggagatcaaaacagaagcagatatggaaaaagcagcagaagtcatttgtaacactttaggctgtgcggttttattgaagggtggacatcagttaaatgatgccaacgaccttcttttccagaaaggaaaagagccggtgtggtttcatggaaagagaattgacaatccaaatacccatggaacaggctgcacgctttcttccgcaatcgcatcgaatcttgcaaaaggaagggatttagaaacttccgtcaggtatgcgaaaaattatatttccggcgcacttgccgccatgcttgaccttggaaaaggaagcggacctatgaaccatgcatttgcgatcgaaggagagtacgaaggatgaatgaaaagagaacttccgttttttcaaacggattaatctggtttggtgcgggcgtatctttagccgaaatactgacaggtacatactttgcaccgcttggctttggaagagcaatggcagcgattctactcggtcatctgatcggcggacttatgatgtttgcggcaggaatgatcggagcgaaagagcgcaaaagtgccatggaaactgtaaaaatgagctttggcgagaagggaagccttctttttgccgtattaaatgtattacagcttgttggatggactgcgatcatgatctatgatggcgcacttgcggcagacggcgttttacataccggaaactgggtgtgggcagtcatcattggtgctttgatcattgtgtggattttcattggactgaccaatcttggcaaattaaatacggttgccatgacagcactttttattttatcactggtactttttaaagtgatcttctttggcagcggcagtatgacgccgatcgtggatgacggaagtttgacattcggagctgccgtagagcttgcggtggcaatgccgctttcctggctgccgctgatcagtgattatacaagagaagcccaaaaaccgtttgcagcaacactcgcaagtgtgattgtctacagtctggtcagcatttttatgtacatgatcggtatgggagcggctatttttaccggtgaatatgacattgcgcagattatgttaaaaaccggtttcggcgttgtcggacttctcattattgtattttccacggttacaacaaccttcctggatgcctattccgcaggagtttctagtgtttccatttcctcaaagattcaggaaaaatgggcggcaattgttgttactgtgattggaactgtcgcagcaatcgtttatccgatggataacattacaaactttttatatctgatcggttctgtttttgctccgatgatcgcagtgcagatcgcagattacttcattttaaagaaagcagatgccggaaaatctgcatttcagtggcgtaatctgatcgtatggcttgccggatttgtgatttaccgcatattgatgcaggtggatacgccggttggaaatacgctgccggatatggtggtcacagtcattctctgcctgattgtggaaaaagctgcaggggcagtaaaatcaaaataggaactgttgcagtcttatcattctttttttagaatgtggtatgtggcagattctgggaaaagaggacaaaatgaaaaaatttaatttaaagaaattgacagttacagcaatcttagcagcagtagcggtggtgggaagtttattttccttcccggtattcggttcaaaatgtgcaccggtacagcatctggtaaatattttatgcgcagttaccgtaggaccgtggtgggcactggcacaggcatttattgcggcgctgatccgtaatctgttaggactgggaagccctctggcattcccgggaagcatgtgtggtgcattgcttggcggacttctctataagtatgggaaaaaacttccatttgcctatattggcgaagtagttggaaccggaatcattggtggaatgctctcttatccggtggcatatcttgtcatgggtaataaagcagcggcgttattcacatttgttgttccgtttctgatcagcacctgtggaggaacgatcattgccattattattactctgccgttgaaaaaatcaggtatgcttggcagaatgaaggaaagtttagaagagtaagatagaaatcaaaaattttggattatcatttaccacgatccggctggataccgtgggtttttaaagaaaatgtcggaggctctgctattgttggcggagccttttttagtttgcgcgccatgggcgcactctaacgggtgcaagtcccgaacacgcccagatagtgggaagtgtatagctgaacagcaaatatcggagatttaaggcagaagaattatcggaaactgacattgcatggatctttgatcaggagtattttgagcatccgcagtgtctgaaaatgtataaatggaagcggggatcaaaataaattcccgaaactaaaactacagatataatgaaaaaatatggaggcaagtgaaatgaatattcgaagagcaaacgaaaaagatatcccaagactgattgaattattagagcaggtgcttcaaatccatgcagatataagaccggatatttttattccggggacgacaaagtacacagaggatgaactgaaagaaatgttaaaagatgatacaaagcctgtttatgtagctgcagatgagaatgacgtatgcttaggatatgctttctgccagttgaaacagcagccattctccaataatatggtgccgtttacatcgctttttatcgatgatctgtgcgtcgatgcaaaaaccagaggacagcatgtaggtgagagcctgtttgaatatgtaaagggcgaagcgaaacggttaggctgttatgaagtgacattaaatgtctgggcaggaaatacctccgcggaaaaattctatgaaaaaatgggattaaaaaccaaagagagacagatggaatatatattgtagaaaatgaaaaatgggagattcatatgtgtttgcaggagattaaagatgaaataattgacgctggaaaagaaagtgtattggaaaatatggtgagtctttatctgcatgaattgtctgaaaaagaagaaattttagatggttacgaagtttatacgcagctattttgtgtataagattttttgttgagcacacctatgaagctttcccccctggcagcagagcagttacagatcccgttcccgtggcacggaaaccatgttttttctggtgtatgaggtcacggatgagatgtcaaagtattgtattagctggattgggggtgaagataaaaaatgggtgaaatatgaggaaaataaaagtggttcgcccgatttataatagaaatttatcagatataaaagagaatgggcgaaaagtgatggaattcatttcaatagcccacggaaatcaaaaagtcagggcgaaaaacagcagaaatgaagaagattcccccaaaatgcctgtggaaacgctgaaatgaggaagaaagagggcgaaaatgtctgaaaaaatcggattttcgccctgtcatctgtttaaaattatctcacgatcgtatcccggatctggtcgagtgacacctcatagttatggccggcagaaatggcttttaaatcttcaaactctgctttctctttttcgacaccgtacccgctgctttttttgatccgtatatcgccgtatgcggaatggcaggtttcgatttcagaggtaagtttggcgcggtcaaacatctgatagcgcacaccgcgtgttgtggtgtgtaaaaagaaaagggaagtcagacgttcacggtcttttggctcacagatacaggttaaaagaatacccggacggttctttttcatctgaatcggtattgtgtatacgtccaaagcgcccgcctgtaagagcagttcagttgcaaatccgaccgcttcgcctgtcatatcatcgagattgcaggagatggacagcacggagtcatcaaaggatggggctgtgttggaaccgggagaagattcgccgaggaaaacacgcacacagttggcggcagcaaaatcctttgttcccataccatagccgatctctgttacattcataggcggcatggcttcgaaagaggtcacaaaatgttttaaaacagcagcccccgttggcgtacagagttcgccctgaatatttctactgtaaaaaggaatcccttttaaaagttctgcggtggcaggcgccggaaccgggagtgtgccgtgggcacagtgtacaaagccatttccgacatgaaccggagagcagagaatggtttccggtgcaagcaggaacaacagataggcacatccggtcacatccacaagcgcgtcgatcgatccgacttcgtggaaatggatctggtctaaggtggagtggtgcacttttgactctgcttccccgatcagacggtagaccgcggcagtggagtcttttacggatgatgggaaagaaagcgtgtggatctgttctaagatctgggtgtaactggtatgggcatgcgtgtggtggtgttcatggtgcgagttgttgtcgtgagtatgtgtgtgctcattttcgtcatgaatatgatcgtgaacatgcatgagtgtatcctcgtcatgagagtgtccatgtgaatgcatgagtgtatcttcatcatgaacgtgttcatggtagcattgtgtacaatgatcgtgtgtaggggattcttcctgtgcatggattgtcatgtgcccatcttcatgaatgtgttcgggcagaacatcatgggaatgttcttcctccccgtgtacagccactttcatgtgtgtgccgctgatcccgcattttactgccggttccacagaaagtgtcacaccgtaaggtgcaaaagcctgattcatgtccgataaaaatttttctttctgatcacagagttcatagagggcgcccattaacatatcgccggcaacacccatattacattctatataaagtgttttcataaataatcctccctggtgctgaatttgatattttttaatatgaagatttacagtttgtccgtgtttttatggcaggatgatggtctgtcatctgttttaggggctgcctgatgattgatcatgctggcaaggtaacctgcaccaaaaccgttgtcgatgtttacgacggaaacaccgctggcgcaggaattaagcatcgataaaagtgctgagataccaccaaaacttgcgccgtaaccaacgctcgtcgggacgccgatgacaggacagtcggtcaggccgccgatgacgctcgcaagcgcgccttccatcccggcgactgcaatgatcgcatttgcctttgataaaagttccatatttgagagcagacggtggagcccggcaacgccgacatcgtagagacggatgacatgattgccgagtacctctgcagtcagcgcagcctcctctgcaaccgggatatcgcttgtccctccggtggcgacaacgatcgtgccgtcagcggaataatgctcggtgcggtttacgatgccgatttttgacagctcatcgtaaaaaagatcaaaacgttcggacaggtacgccgcggattctgtcgaaagtcttgtgatcaggatattttctttgcagtgggagagcaggctgtttataatgccccccatctgttcttttgtcttagatgcaccgtagatcacctccggcgcaccctgtctgacttcacggtgatgatccaccttggcatatccaagatcctcaaaaggtgccagctttaactggttataagcatcggaagcagtaagctgccccgattctaactgttctaatatatgtttgatatgatcattttccatagtaatcctcatttctgagcaacttgttgcgaagaggcgacgagaatctcaaattctcgtctgtcatgttttttatgccttgtcatagaagctatttgtttttgctcagaaacaaatagccgtgcgaaaaataagctatcgagcttatttttcacactaatttctccttcattgcaattcactgcctattatactcacatcccaccttatttgcaaaaataaaatgcacacgattctctgggttttggaagaaatagataaaaaatggaaactatttttggtaaattagtttcttgcgggtacgaaaacaagatgatacaatataggaaactcaaataacaaaaatagtttccatgtaataaagaagaaacggagaacatgatggaattaagggagagtattttagagggaaccttaaaggcatttaaccagaaagggttaaaatttaccatggatgatctggctggaatccttggcatgagtaagaaaacgatttataccgtgttccgtgataaggaatcacttttcttagcgatggtagattatctgttcgattcaatcaaagagagcgaaagacaggtgttagagaatgaaaaattatccacacttgaaaaaatccgggcggttttaggtgttttgccggagagttaccgggaagttgatttcagacagctctatctgttgcgggaaaagtatccgaacatctacaaacatgtggaggaacggttagaaaccggctgggagacaacgatttccttattagagcggggaatgaaagagggcgtgatccggccggttaagatcccaatcgtaaaaatgatgctggaggcggcattagagcaatttttccagagagatatcctgatctctaacgggatatcctatcaggatggtctggatgaagtagtcacgatcttagtgcagggaatcgttgcggaagggaagtgaggatgatgcaaaaacgcatttactggaatgacgggtggaaatttaaggaaacatacgaaaatcaaatgagagagacggcttatcaggatgacgcatgggaggatgtcagactgccgcacacttgcaaggagacaccgtttcattattttgatgagagaagttaccagatggtgtgctgctatagaaaacattttttttcaccggaagaatggaaagatcagaccgtgatcgtgacgtttgaaggcatcgcgcatgaagcacaggtgtttttgaacggggaaaggatcggggagcatcactgtggctacacggcattttccatcgatatcagcaaaaaactgcggatcggggcagaaaatgtgcttacagtgcgggtggatagcagggagaacttaaacatcccgccgttcgggtatgtgatcgattatatgacttacggcggaatttaccgggaagcctatgtggatctgaaaaatgagacttatctcgcggatatatttctgcacagcgatatcgaaaaaagtaaaatacaaaaaaacggagagcagatagcagatactaagctgatctctgaaataaatgtttttagcagcggaaaaaccaaccgtctgaaagatctgtttatccggcagagcatcagagagcgcggcacggaaaactacagactgcttggcgagaccccggcagcagtaaagacgcagctttcctttccgatatcggacataaaactctgggatctggaaacaccggtactctatgaagtaaaaacagaacttttgcaaaatggaaatattctggatgagaacgttacgctgtttggattcagaacagcggtatttttaaaggatggtttttatttaaatggcaaaaaagtaaagctgcgaggattgaaccgccatcagagttatccatatgtcggctatgcaatgccggaatccatgcagaaacgggatgcagacattttgaaaaatgaactgggcgtaaatgcggtgaggacgtcccattatccgcagagccggcattttgtggagcggtgtgatgaactgggacttttggtctttacggaaataccgggctggcagcacatcggggatgaaatctggaaaaaacaggcggtcgaaaacgtaaaagacatggtagagcagtatcggaatcatccgtctgtgatcctgtggggtgtgcggatcaacgagtccggggatgatgacgcattttaccgggaaacaaaccgcgtggcacatgaactggatccaacaagacagactgggggtgtccgggcacataaaaagagcagccttttagaggatgtctatacctacaatgatttcagccacaatgggacaaaccacggatgtgagaaaaaaagtgctgttacgtctgataacagcaaaccgtatctcatcagcgaatataacggacatatgtatccaacgaaaagttacgactgggaggaacaccgtgtgtggcatgccatgcgacatgtaaatgtattagatgcagttgccggggaagcggatatcgcaggaagttttggctggtgcatgtttgactacaatacacataaggattttggcagcggcgaccgtatctgttatcacggtgtgatggacatgttccgaaatccgaaacttgcggctgcggtctacgcgtgtcagcaggaaaaggagccagtacttgaaatcagttcgtccatggatatcggggaacatccgggctgtaaccgcggaacgatctggatttttaccaatgcggacagtgtacggatgtacaaaaatgaccggtttttaaaggagtataccgcatcagattcgccgtataaaaatctttcacacggaccaatcgcagtggatgactttatcggggatgccattgaaaaagaggaagattttaaaccggagcaggcaaggaaagtgaagtatatcctgaatgcggcggcgcggtatggactttccgatcttccgaaaggcgtgtatttggcggcagtgaagcttatactcatgtatcacatgaagccgacggatgcagtggctttgtacaaccgttatatcggtgactggggaggtacttcgacaagctaccggtttgaggcagtaaagaatggaaaagtggtaaaagtggtcagaaaagagccggtcacttccatgcatttatccgcggaaccggaccatcaaaacctgacagaacgacatacttatgaagctgcggaaatccgtatccgtgccctggatcagaacgataatatcgtaagcttttaccaggaaccggttgtactgtcgacggagggaccaatcgccatcattggacctgaaatcatttccctgcagggaggcatgggcggcacttatgtcagaacgaccggggaagaaggcgtcgggattttaaagataaaagcggcacagatggaagagcagagaatactgtttgaagtgaaaaatgacagaaaataaacagtcactgtgttttacaatgtgaaaagaaatttcgaaaagaattttaataaatacaaaataaggaaggatgaagtgtaagatgacagaacgatcaaaacagatttttggaaacgacattgcaccgggtgcctataaaaaagcagtccggtcaaagcagaaatttatccgtaaattcggggatgacagcacaaaaaattatccaacttcgatcaaggcaaacccgtatatcgggccggaacttggtgtctctgatatccgcgtgggagaagaaggagctgcggactttcatacggagaaaggaatcatcgtcggaaatatccgtatgggatttggtcattaccgcatctccatggcgatcgcatccgcagcacatgcgctggggtatgaaccgtactggatggatttaaattcctacggacagaccacctgtaccaaagtgatcggtgcgcagaatgatctttactccatgggttcccgtctgtcacagaagagcagactctttaaccgtctggtgtgggagccgatgaactatgagggattccgcaaactgacctacaatgcagcagatcagaaaaatgcagaattgatggctccggtgtatgcgaatatcccaaaggatatcccggtcgtcgcaacgcatgtgtggccggcgcaggctgcgcttcacgccggaatgaaatatgtggtcaatgcgatcccggacaactggcagatggcgcttcatttagcggaaggcagcattcacacggtgcagacgcactatgcataccaggggtaccgcattttaaacggaatgcaggggaatgatgtgttgaatccgatgccggaagatgctcttttttataccggacattatatcgaccatgagcttgtcagcaatatcgagacggactgcgcagcgagaaaacagagaaaagaggagggaaaaccgatgcgttttctcctgacgatcggcggtgccggtgcacagaaagaaatttttgcagagatcatccgttttttgctgccacagatcaaagaaaagaaagcggcgctttatgtcaatgtcggtgattaccgcaatgtctgggaggaacttttaaaggaaatcccggagatgggacattatgcgaaagaacattttaacgactgggaggatacgaaaaaatttgcgggggatgcgcttaacaaagatgtcatcggaatccacggcttctggcatgaaaatatttttgaagcggtatactgcacgaatcttctgatgcgaagctgcgatgtgctcgtcacaaagccgagtgaactttcattttatccggtgccgaaactatttatcagacgtgttggaggacacgagcagtggggagcaatccattccgcggagatcggtgatggcacattagagtgcagggatatcccgcacacgcttcagatgatgaaactgtttctggaagaaaaaacactgctctgcgatatgtgcgacaacattgtaaaaaataaagaagccggaatctacgacggggcgtataaggtcgtggaacttgcattttcgatgaagcagaaaaaattttaggaaggaaaaaaatcctctgctcgccagaggactcgcattttccttcggaaaacaagggaggaaaatcctctgctcgccagagggctcgcatttttctccgaaaaacaagggaggaaaatcctctgctcgtcagaggactcgcatttttctccgaaaaacaaggaggatttatgaaattaacaggaaaagagaaagtctcatacggacttggggcggtcggaaaagatatggtttatatgttttcggcaagttatgttttatattattatcaggatattttaggagtcagcgcgatcgcaatgggaatcattttgatggcggcgcgtgtgtttgatgcatttaacgatccgatcatgggtgtggtcgttgcaaagacgcgcacaaaatggggcaaattccgcccgtggctgtttatcgggacactgacaaatgcagtgattttgtatctgatgtttgcggcaccgccaaaactcgacggaaacggactggtggcatatgcggcagtgacttacattttgtggggtgttacctataccatgatggatatcccatactggtcgatgatcccggcttttacggagggcggaaaagagagagaaggactttccacactcgcgcgctcctgcgccggagtcggttctgcgatcgtgacgatcatcacaatgaaatgtgtctatatgttagggcagggaaatgagcgagtcggtttcaaatggtttgcgctggtggttgcaattctgttttttgtatttattttaatcacctgtttaaatatcaaagaaaaatctaccgtggatgtggaggcaccttcggttggacagatgttccgttccctgttacagaacgatcaggcgatgacggtcgttgtgacaatcgttttgatcaactgctcgatttacattacatccaatctcgtcatttattttttcaagtatgactttggcggtgatagctggtacaatgcctataccttatttaatacgtttggtggagcaatgcagattcttgccatgatgctgtttttcccgatcctgcgcaaatttctgggaacgatccaggtgttttataccagttttgtgatggcgattttaggatatgcggttcttctgattttaatgtttgtcaatatgtcaaacctgtatctgctgtttgttcctgcattttttatcttttcagcaaatggaatgttatccgttctcacaacggtattccttgcgaatacggtcgattacggagagtggaagaatcacagaagggatgagagcgtgatcttttccatgcagactttcgttgtaaaacttgcttccggtgtggctgcgcttgtggcatcgatctgcctgaccgtctgcaatttaagccagaatacggacggggcagcagttgcggcagcgggaagttcggtcgcaggactgcgcctgaccatgacagtattcccgatcgcaggactgcttgttgcggtattttatttccgcaaaaaatatattttaagtgagcagaaagtggaagaaatcgcaaaagagatcaaggagatgaaaaaagcatgatcacagtcgaaaaccagttattttccctgcataccagacatacttcttatctgttccgtgtcatggaaaccggacatttggagcacttatattatggaagaaaaattcatccagccatagacggattgatggaacagcatgcatttgcgccgggcaataccaatatttatgacagtgaacatctgcagttttccttagaggacgcatgtcttgagatgtcctctttcgggaaaggcgatatcagggagccttttgtggaactgacactttccgatggaagcgaaacgtctgatttcctgtttgaaaaatttgaacagggaaccggaaaggaagaatttgagacacttccgggatcgtatgatgagtccggtgaggtggagtggcttggtgtgacactgcgcgataaaaacagcggagtcatattagaactccattattatgtctatgaggactgtgatgtgatcacaaggagcgcaaaactcatcaatgagagcggggatgtggtaaagttaaaccgcctgatgagcctgcagcttgatttagaaccgtccgactatgtgtttacaacatttcacggggcttgggcacgtgaaatggggcgcacggacgtacggctggtgccgggaaaatatgtaaacgcctcttacacgggaacgtcgtcgagccgtgacaatccgtttgtgatgcttggaaaagaacataccacggaggatgcgggggaatgttttggatttaatctgatctacagcggcaatcactatgaggcggcggaggtcggcagttttggaaaagtaagaattgtatccgggatcaatccgcagtcgttctgttttacacttgagtcaggggagagttttgaggcaccggaggcggtaatgacctacgcatcagacggatataatgccatgagccagaatatgcaccgttttgtgcgggagcacattgtgaggggaacctggaagaaaaaggagcgcccggtgctcttaaacagctgggaggcagcctattttgacattaatgaaagaaaactgctctcacttgcaaaagcgggaaaagaggcgggcattgagcttttcgtcatggatgacggctggtttgcaaaacgtgataatgatacaagatcgttaggagactggcagccaaatccaaagaaactgccgggcggtttaaaggggattgcagataagatcaaggcgattggcatggattttggaatctgggtggagcctgagatggtcaatgtggacagtgatctctaccgcagccatccggactgggtgatcgagattccgggaaaggcgcactcggaagggcgcaatcagaggatccttgatctgaccagaaaggacgtgcaggatcatatcattgaggagatgggcagagtattttcctccgcggacatttcctatgtaaaatgggatatgaaccgcacattttcggattatttttcacagagtatccgtcctgaaaggcagggggaggtggcacaccggtatgtgatgggactttaccactgcatgagggagctgacaaagagattcccggacatcctgtttgagggctgtgctgcgggtggaaaccgttttgaccttggtatgctctgttatttcccacagatctgggcgagcgatgatacagatgcgctctgccgtgccgagatccagaccgggtacagctacggctacccgatgtccgtgataagcgcacatgtctccggctgcccaaatcatcagacactgcgcacgacaccgcttgaaacacgttttgcggtagcggcgtttggactgctcggatatgagtgcaatttctgtgatctgaaaaaagaagagtcagaagccatcaaagcgcagatcattctttacaaaaaatggcgcagtgtgctgcaacagggaattttttaccgtggcaggagttttacagggaacggcagaggaaatgcgtttggaaaaaacagtgtcctctggaatgatgacagcaatgtgacggaatggacgtgcgtctcgccggatcagtcgaaggcggtcggcttcgtcatgcaaaagcttgtcgtgccaaacacgcagttcgggtactataaaccacagggactctgtgaggaaaagaagtatcatttttataaccgttctttaaaatataatgtcaaagagttcggggatctggttaacaccgtatcaccgatccatatcagacaggactctattgcgcacaatctggttgcaaagtttgtgaaaatggacggggaaaaggagaatattacggcatacggggataccctgatgtatggcggcgtgaagttgaaaccggcattttccggcaatggatataatgagaatgtgagatattttcaggatttcggggcgcggatgtattttatggaagaggctttcgaagatcatgctctatgattttggttcgtcgatcttaaggagcatcggggacagtgagcacccgctttacagcctgatcgctgcagtctgtaagagagtgcacgaattctgggtgctgatgatcatttacccgatttcgtgggttgtgacgggaattgcgatgatgatcgcgtatacgttgctgcggagaaagattttggcaaaaagtagtgtaaatcagcttgaataaaaaaatataaggggaaaaaatgtcttatatcatatcctacgtcggagccggcggaaagaccagcagcatttatcaggatgctgcagcgtttgtaaacgaggggaaaaaagtcatgatcacaactacaacgcatatgtatgtgccaaaagaccgagtgttcattgatggcagggagaaaagttgtgagaagctgcgagaggaagtagccgggattttgaaaaaaaacgggatctgtgtgtgtggcacaattttaagtgataataagaaaacagagatttatgcggttggaaaatgtgccggaaacgatgctgttgaagaacagcagaagatggaaccggagaagtttaaaactttaagcgttaaacagcttacagcagtatgcaaagaggcagatgttgtcctgatcgaggcggacggcgctgcacataaggcggcaaaagcgccggaagcatgggagccggcggtgtatgcacagagcaataaagttgtgatcgtcatgggacttcaagcagtcggaggaagtgtggatgaagtgtgccacagaccagagtgcgtaaaggaagcattagactgcgacggagcgcatcttttgacgcgtacggatttggatgtactgatggcggtctatgaaaaaaagatcggacagcagtttccggggatggagacggagcggagatattttataaaaagttcttgacactaccgctttaccatgctaaaatcgaaacaacttaaaaaacaaagaaacgttaaatcgttgagcaaagagagtacttcataggatatctcacagagagtccgtggctggtggaaacggacagatgaatatgaaaggaatgggtttgcgagagcaaagcgaacagcgtaccagatggtatggtcagtagcggatgccgtgtcctcacgttacagaggtaagatatcggacagtaaagaaagatagctgtttgtgtgtcggatgaggtcagacatgattggtggcggatatttccagtttttgggaatatccgtttttttcattcataggaaattacgtcctatgaatgaaaaagccctccgggcgggatgcgcaccttgcggagatgaagtttgctgtaaacagcaccgctcgggcgcgaaagagtcgcaagcgactctttgtcctgcatggaatcataatgtctggcgaaacagggtggcaccgcgtgaaaacgcccctgactggaaaaaaattccggtcaggggcgttttttaacaataaaattcgcgcagagtgtgaactttattgttttgataacatggttttgcaacaggtgattcgagaatggagattgggatgaaaagaatttacagagtttacaaaaagacagtcagtattgtaaatgagacagcaaccgggatgtaccggaatctggtgggaaagaaaaaaggatttttgttagagagttatgacaagaattatgaccgctatacatttttcggcgtagaaccggaagagatcatttcctcgaagggacagtcactggtgattacaaaaaaagatggtaccgaggttgtcagggagggaaatccgcttacattattaaaagaatattataacgaatttgaaatccggaaggacaatgaggaactgaatttttcgggaggtcttgtgggaagtgttggttatgacttcgtgagatacagtgaggtgctgccggaagaaaacccggatgagatcgggattgagacggttcagcttatgctgatgaaagaattcattgtggttgatcatgtggcagaaacactgaccgcggtgatcttagaatccgatgatgagacaggaaaagaaacggcagcgaaaaaagcagcagaattgatcaaaactgccatgcaggaacagaaagaatcagaagtaagactgtttccggatggagtgatcacgaaaaagtcagatactttagaggaatacagtgaaaaggtaaataagatcaaacagtatatccgcgacgggcatattttccagaccgtgttatcacagcgctggacgatcgcgacgggacaggatggatttgatctgtactgcgaactccgtgagctaaacccatctccatatctttattattttaattttggagattttgaagtgattggaagttccccggagatgctggtcaaacaacaggggaatagggtatttacctgcccgatcgccggaacaagaccaaggggaaagacaaaggaagaagatgacagactgcacagggaattgcttgccgatgaaaaagaacgtgccgaacatgtcatgttagttgatctggcccgcaatgatatgggacgcatctcagagtttggtacggtaaaagttacagactttatgagcgtaaaaaattattcacatgtcatgcatatcgtctcgatggtcgagggacgcaagaaaggcagttttcacccgtttgatctgctggcatccttcctcccggcaggaactttgagcggagcaccaaagatcagggcgatggagattatcgaagaactggagagtgtgagaagaggcctttacggtggtgcaaccggatatgtggatttttccggcgatatggatttctgtatcacgatccgtacgatgatcaaaaaaggaaaaaacgtttatttacaggcaggagccggaatcgttgcagattctgttccggaaaatgaatacaaagaatgttgtaacaaggtcatggctctggcaaaaacccttgtggaggaggaaaacttatgatattgctgatcgataactacgattcatttacatttaatctgtaccaatatattggaacttttacgcaggatataaaggttgtccgcaatgataagattacgatcggggagataagagagttacatccggataaaattgttctttccccaggaccgaaaagtccgaaggaagcaggaatctgtatggatgtggtaaaggaattttacagagagattccaatccttggcatctgccttggacatcagtgtatcggtgaggcatttgggggaaccgtgacatacgcaaaagcattgttccatggaaaacagtcagagatcacacataccggaactggaattttcgcaggaattacctcaccggtcaaggtggcaagatatcactcgctggcagtgcagatggatgatctgccggaatgtctgacggttacggcacagaccaaagacggagagatcatggcaatgcagcataaagaatatccggtgatcggtttacagtttcatccggaatctatctatacggaacatggaaaacgaatggtggaaaattttatcaatggaatcaattaggaggtagttatgatactcgatgtcattgtagaggataaaaagaagcgtctgccggaacataaaaagaatatcagtgaaataaaaatgcgtgaactggcagagaagtatgaaggcaaaaaacacggtttttatcaggcattaagtaaaagtggtatttccattatcggagaatttaaaaatgcttccccaagtattgggaaaattaaaagtaaaataaatttattgaacagaattgatgaatataacgaatcggtagacgcaatttcctgcctgaccgaggaagatcattttgatggaaatgtggactatctgaaaaagataaggacgatcacggagctcccaatcttaagaaaagattttatgatcgatccctaccagttttatgaggcaaaggcgattggggcagatgcagtacttttgatcacagcaattttagatgatgcacagatgaaagatttttatcagttatcgaaagaattagagctggatgcactggtggaagtacacgatgagaaagaactggagcgggcaatgaagatcgatgcagatatcattggagtcaacaaccgcaacctcaaagattttacaatcagtctcgatacgacggtacagctttcgaaactggtaccggaagacaaagttttggttgcggagagtggtatcttacaggatgcggatgtggaacttttaaaggaatgtggtgtggatgcattcctgatcggcagggcactgatggaagcggagcatccgaaggaggttgcaaagaggtggaaagcataaaacagaaagatccacagatcaaaatctgtgggatcacgcaggatgaggaaatacaatggctgaatgaagcggatgtttcctatgcaggatttgttttatatgaaaaaagctgccgttacattccaatcagtaaaacacaagaattgtttgaaaaattaaatgacaatataaaaaaggtagctgtcgcagtaaacccggatgtgacgatggtaaaacaagttatggatgcggggtttgatatcctgcaggtgcatggcaatctgacagaggaagtcctcgcagtgacagagatcccggtctggcgggcggtcaatcttacggatgcgaatatatttgaggaactagtgagggaatatagagatttatccatagatgaaaaaatcacggcacttctcatggatgccaaagagtttggaagcggaaaaacctttggatgggatgcatatgagagagacgagggcaaagaaatgctaaggcagttacgacagatacttgagaaagaacaaatccagtttgtacttgcaggaggtcttaccccggataacgtcagccgggggatagatattttttcaccggatatcgtggatgtcagttcgggtgtggaaaaagaacctggacagggaaccggaaaagccagggaaaaaatacagaaatttgtgcggaacatgcattctattgtttagacggcggaaaatcagaaatataacagtatttcgttatagaaagtgataaataaagcaaaagagatataagttaattttaaatttaagaaaggaatacaaaaattatgaaccagaaagcatattacggagaatttggaggacagtatgtagcggaatctctgatgaatacattaggggaattagacaaagcatttgaggaggcaatccatgatccggaatttatggagcagtaccattactatttaaaacagtatgtgggacgcgagacacctctttactttgcggaacgtctcagtgaaaagtatggcacaaagatttatttaaaacgtgaggatttaaaccataccggagcacataagatcaataatgtaattggtcagatcctccttgcaaagcgtatgggaaaaaagaaagttattgcggagaccggtgccggacagcacggcgtggcaactgcgacaggtgcagctttgtttgacatggaatgtaccgtttacatgggcgaggaagatatcaggcgacaggcactgaatgttatgagaatggagatgttaggggcaaaagtcgtaagtgtccgttccggcagtaatacattaaaggatgccaccaacgaggcaatccgtacctgggcaaagacagcggaagataccttttatatcataggttctgcggtaggtccatatccttatccaaagatggtcagggaatttcagagcgtgatcagcagagaagcaaaaaaacagttcttagaagtggaacacaagctgccggatgccgtgatggcatgcgtgggcggcggctcgaactccattggaatgtttgcagattttatagaggaaccttcggtaaaactgatcggcgttgaggcggccggaaagggaatcgagacaggtgagcatgcgtcggcgatggcacttggtgagccgggagtcttacatggcatgcgttcctatctgctgcaggatgaagatggaaatgtaaaactggcacactctatttccgcaggactggattatccgggggtcggaccggagcacgcctatctcagagacagcggaagagccacatatgtttccgtgaccgatacagaggcaatggatgcgctgatggaactctgtaaattagaaggaatcattcctgcgattgagagtgcacatgcagtagcttatgcgagcaaatatgcgaaagaacttaccgaaaaacttggtgcagcggaagcaaaggataagacaatgatcatctgtctgtcaggacgtggagataaggatgtcaatacgattgcggattatctggcaggaaaaggctacctgaactgattcagaaaaaataaattaaaataatataaacatgatttaataagcgaaaagaagggaaagacagatatgaatcgtattgaagcaaaaatgaaagccttacaggaaaaaggcgaaaaagcatttatcacttatattacagcaggacttccggatcttgagggaacaaagaaactgctaaaggcgcaggaggaggcaggacttgacgttgtggaacttgggatcccgttttctgatcctgttgcagatggtccggtcattcaggatgcatcctacaaagcaatctgtaacggcatcaatttaaaaaaagtatttgtgacagtagaggagctgagaaaagaaggttcagagcttccaatcgtctttatgatgtattacaacaccatacttcattatggggtagaggcatttgtgaaaaaatgtaacgaggtcggtgtggatggtcttattatcccggatctgccgcttgaggaacaggaagaaatcgcaaaatacttaaatcaggatgaaacaattattctgatccagcttgtttcaccggtttccggtgaccgtattccaaagatattagatggtgcaaaagggtttgtatactgcgtatcttctatgggtgtaaccgggcagggagcagatttccacaaagaagttttaagttatctgaagagcgtgaaagctgtcgcaaagattccggtcatgatgggatttggtatccgcacagcggaggatgtaaaaccgatgaaagatacgatcgacggtgcaatcgtgggaagccatttcatccgtctgatggaagaaaatgattacagcacaaaagtggcagcagagtattgcagtacatttaagaaagaattaaatcaactttaaataaaaatagggaggaaaatcatgcacagcatgctgggcattgctcctgcaagaggcaaatgctataaaaaacatagcatgtattttgctccgcaaaacagggaggattatcatgaaagaatacatagcaaaagcagtagatggaaaaaatttaacacaggaagaagcaaaaaaagcaatggagatcatgttaagcggagaggcaacgcaggcacagatcgcagcatttttaacggcaatgcgcatgaaaggagaaacgttagaggaactcataggtctggcatcggtgctgcgcgataaggcggagacaatcacaccgaaatctgaaaactatgtggatctggtcggaaccggtggagactgtacctatacattcaatatttcaaccacatctgcgtttgtggtcgcagcggcaggacttccggttgcaaagcatggcaaccgttccatctcctcaaaatccggtgcgggtgatgtgttagaggcacttggagtcaacattatggcagaaccggcactggtacagaaatgtgttgatgagaccggaataggttttatgtttgcacagcttttcaataaatccatgaaatacgttggccaggtgagaaaagagctgggaatccgtacggtatttaacatcttaggacctcttgcaaatccgtcccgtgcaaaaaatatggtcgttggtgtatacagtccggcattgacggagaaaatagcaaaagctatgggcagacttggcgtggagcgcggatttgtcatcagtggaaatgataatatggatgaatttacgttaagcggaacgaccacagtatcagagattgatggggaaaatgtaaaaacctatgaggtaacaccggagcagtttggattaaagagagcttccttagagaaactgcgcggtggagacggtgcacagaatgccgagataacgaaagctattttaagcggaaaagaaacaggagcaaaacgtgagattgttcttttgaatgccggagcaactctttatatcggaggggttgcagaatccatagaatctggtgtaaaattagcggcagaaaccatcgactccggaaaagcaatgaaaaaacttgaggaattagtcagagtttcaaattcatagaaaagcacgaaaagtgcaggaatggagaaaataatgatacgatttaacagcgattatacggaaggatgccatccggcaattttaagaagactcgaagagacaaacatggaacagacggcgggatatggagaggatgaatattgcagggaggcggcagaacggataaaagctgtctgcgaagcaccggatgccaatgtacattttctggttggggggacacagaccaatgtcacagtgatcgcatctgcattaagaccctatcagggagccatcacggcgacgaccggacatatcaatgtgcacgagacaggggcagttgaggcgtgcggatataaatgcctgacggtcgatacgccggatggcaagctgacggcagagcaggttgaaaaatatacaaaagcacattttgctgatgagagttttgaacatatggtacagccgaaactcgtgtatatttccaatccgacggaacttggaaccatctataaaaaggcagaacttgaggcgttataccgggtttgcagggaaaacgatctgtatctgtttttagacggagcgagacttggatatggacttgcatgccgggaaaatgatctgacgatggcagatattgctgcgaatacggatgttttttatatcggaggaaccaaggtaggtgctttgtttggtgaggcagtcgtgatcaccaatcctgaactgaaaaaagatttccgttatagcatcaagcagcgtggcggtatgctggcaaaaggaagattgttaggaattcagtttctgactttatttgaggagaaccgttattttgaaatatcagcacatgcagcacgacttgcagaaaaattaaaagatgaattaacaaaaatgaacatttcgttctatatcaattccccgacaaaccagcagttcccgattttgccggatgatgtattagacaagctgcgggaaaaatacagctttgcatatcaggcaagggtggatgaaacacacagtgcagtgcgtttctgtacctgctgggcaacaaaagaagaaaatgttgaagcacttcttgcagacataagagcaatcatatagaaatggagattaccggtatgtcggcaaagaaaaaaatattattactcgcaacagggggtacgattgcttctaaaaagtctgagaatggattaaagccacagatcacaccggaagaactgttagagtatattccgcaggtaaaagaattttgtgaggtatctgcaatacagcttttgaatctcgacagttctaatatggaaccggaacattggaaaaaaattgtacatgcaatccgggaatattatgatgcttatgatggatttgtcattgcacatggcacggatacaatggcatatacagctgctgcactttcttatatgatccagaattcaacaaagccgatcgtgatcacgggagcacaaaaaccgatcgaccttgaaattacggatgcaaaatcaaatctgatcgacagttttttatatgcggcagatgaaaaatcacagggcgtgcagattgttttcgatggcaaagtcattgcgggaacgcgtgcaaaaaaagtaagatcgaaaagctataatgctttttcaagcattgattttccgtcactggcagtgattcaggatggcaatatcatgcgttatctgccgatgctcccatatgaggatgaagtacggttctatgaggaacttgacgagaacattttcctgatgaaactgatccccggtatccgtccgcgggtgttacagagtatttttgaaaattatgactgtattatagtggaaagttttggtgtgggcggtattccaaaatccatagcggatgagttttaccgtctgtgcagacagtacccggacaaactggtagtcatggcaacacaggtggcacacgagggtagtgatatgaccgtatatgaggtcgggcacgatatgaaaaagtactgtcgtttcttagaatcttatgatatgacacttgaatcggtcatcgcaaagacaatgtggatgcttggaaattttgatctgcacagcatagatgtggaggacattttctaccgcagcattaattatgatgtgatttttggaaaaaacagaaaatgttaaaacagattgtaaacaaaagtgaaatatccagttgacaataggaaagaatcggactagactgtaaaaaaacaaatgcggaaacatttttttcgcagaaaagaggagaaaatgaaaatttctacaaaaacaatcgttaccgttgggatgtttactgcagtcctcgcagttctttccattcttcagattccgatgccgaccggtgtgccgatcaccctgcagacttttgcaatggcattgtgcggttatgtgttaggatggcagtctggagtggcagcaacattactttatattgtacttggaactgttggtgtaccgatttttgcgggaatgagtgcaggaccgggagtgctgtttggctataccggtggatttatttttggatttatttttctgacattgttatgtggcatttctgtccgcagaaaaaatccggcggtaaagatcatccttggagtaatcggtcttttgatctgtcatctgcttggtgctgttcagtatgcagttttggcgcatattactattggagcatctttagtggcagtgtcactgccttatattgtaaaagatgtgatttcagtggttggtgcttatctggctgccattgctgtccgtaaggcgctttatgcaggaaatattttacaggatgccaaggcagcttaaaggtggcatatctatgaaaaaatttcgtgtgcaccatattttgtgtaccgtcctttaccggggagagggatacagtggcaccttctgtgtcaatatgacacagaaggtgcgggaactgaaggcagaccaggaagaaccgctcatgctcgtgacagacccggatatgatctgtgcgcgctgtccgaaccggacaccggatgatacctgtgtggatgataaaaatcatgtaaaatcaaaagatctggagctgttagaactgttcggattaaaagaaaatcagctttattcttacagggaactgctgcagtgtgcggaaaaaaagcttgataaggaaaactttttaaaaagctgtggacgatgcagatggtatcagcagggattgtgcagttatgaagaatggctcgaaaatgccagaaaaatcttaaattttcttaaagaactttagaatcagatctggaaacagtataatagtaccagtatagagacttcagcataagtatgctgaagtcttttgcttaacaggattcttttctggatagacagtatgaaaaatatgcctgacaagggaaatcaatattttattccgttttcttgttaatataattcgtcttatactttgagtaaatgatcttctggctgtggtagagtccgaaataaccggaaagcatgtagctgaaagcaactgccagtaaaaagtatggcattccgtcataaccgaacagctcaaaactgatcaaaagagaagtgatcggacagttagttacaccgcagaatacagcagccatgccgacagcggtgcagagtgcaggcgaaaagccgagcaggtttccgaacagacatccaaacgctgcacccgtgaaaaacgaaggcacgatctcgccgcctttgtagccagcgccaagcgtggcagctgtaaagatcattttcagtaaaaatgcttccgggcgcacggtgccgtcgatgcactgtgcgatgatattgacgcctgttccgttgtaattctggttaccgacaagcagtgtcagcacgatcacgatacatccgccgacgaaaacccttacatagggattcttgaaaaaatgtttataaagcgcttcggactggtgcagcatcacgcagaacaggatactgataccggcgcagagaattgccagcacggagatgcggacggcgttgccgattccgaaagaaggaatcgaatcaatgagaaaaagttcctgcgaaattccgaaagaaacggcaatcccatgcgcaacaagggaagagattacgcatggaaccagtgcagcgtaatacatgatgccgacacttacaacttccatggagaaaatagcagcagccataggtgtgccaaacaatgcggagaaacaggcactcatgccgcacatgatcataatatgcttgtccttgtcgtcaaaatgaaacagtttaccaattccgttaccgatgcttccgccaagctgcaaagcagcaccctcacggcctgcagatccgccaaacaaatgggtgatcagtgtggaaataaagatcagtggtgccatcttaagcggcagattatcgtcggaatggatcgcagaaatcacgagattggtaccggtgtcatgctcgtcgtgaagcagacggtaacagccgacaatcacaagacctccaaaaggaagcagaaagatcagccatggatgtttggtgcggatcagtgtgactagcgtcatgccaaaataaaataatgttccggcgcctccggcaacaacaccggagataattgcaaacagaacccatttaatagaagtttcaatgcgttttaaattgtgttttatcttatgcctgatgatttctttcatatctgtaaactccattttcataaacttttaagtttaaatttctaacaaaatcttagcattttcctgctttttttacaatataaaacagtaacaagtgcaatgtgcacaaaaaatgaatgcaatatttggataaaacattgaaaatgtcaaaagagacttgcgcttttgaaaagagtgtcttataatttgatcatcacatgaaaacgttaccggtagcattaccgtaaacaataccggaaacgttccataagataccatacacaatttcaggagggtaaaaaagatgaaaagaaaagttttatcagtgatgttagcatccgctatgttagcaaccatgtttgcaggatgtggtaacggaaatgcggggaatacttccggaacggcaaacgcaggaaacaagacagaagaggctgcaaagacagaagaggctgcaaagacaaccgaggcatctgatgcagaaaagactgcagacagtgcatcaggaagcggttctgtatattatctgaacttcaaaccggagcaggatcaggcatggcaggatttagcaggtatctatacagagcagacgggtgtgccggtaacagttatcaccgcagcagacggtacatatgagcagacattaaaatctgaaatggcaaagagcgaagctcctacattatttcaggtaaatggaccggtaggacttgcaaactggaaagattactgctatgacttatccgacagcgagatctgcaaacagctttccagtgaagattttgcattaaagaatgacgctggtgaggtttccggtgtcgcatatgtgctcgagacatacggtatcatttacaataagaagattttaaatgattactgtaccatggataacgcagtgatttcttctccggatgagatcaacagctttgataaattaaaagcagtggcagatgatattcaggcgagaaaagatgagatcaacagccagttcggatacgatcttcagggtgcatttacatctgcaggtatggatggatcttctgactggagatttaagacacatcttgcaaatcttccaatttactatgaatacaaagacaaaggcatcacaagcacagatgcgattgagggaacataccttgacaattataaacaaatctgggatttatacatcacagattctacctgtgaaccaggtgtcctctccagcaagacaggtgatgaagctgagtcagagttcggtatggaagaagcagtattctatcagaatggtacatgggagtacggcaatctgacaaacgaggataatggatatttagtaacagcagatgatatgggcatgatgccgatttacattggtgctcctggtgaagaaaatcagggactctgcacaggttccgaaaactactggtgtgtaaacaaacaggcttcggaggaagatatccaggcaacacttgatttcttaagctgggtaattaattcggatgaaggacgtgactctatggcgcatgcaatgggattcacaacaccattcttaacatttaccggtgactatgtagctgacaacgtattcattcaggatgcaaaccagtatattgcagatggcaagactcctgtttcatggaacttctcaaccattccttctgagacatggaaagatggcgttggctccgcattacttgagtatgcacagggtaccggtgactgggatgcagttgtaagcgcattcgtagacggctgggcaactgagtatgcagcagcaaacggacagtaaaataataatttctcttttagaaaatagtaaatttgtgcggtatctgtgccgataccgcacaaaccatatataacggaaattttctgaaagaactgtatttagagattgaacggatttatgagaggttaaagactatggagaaatcaataaaaaaatattttccaatttttgcgctcccgactttagtggcatttaccataggttttatagttccttttcttatgggtatctatttatcattttgtgaatttaccacagtaacggatgcgtcctttgttggactgaaaaattacctgcgtgtatttaccgatccaacatttgtacatgcgctgtggtataccgcattatttacagtggtatcagtgcttacaatcaatgtatttgcatttaccatagcgatgcttttaacaaagggaattaggggaacaaatgtgttccggaccgtattttttatgccaaacctgatcggaggtatcgttttaggatatatctggcagatccttttaaacggaattctggcaaacttcggaaaaacattgacctattcttcctcatatggtttctggggactgatcgttttgatgaactggcagcagatcggttatatgatgatcatttatattgcgggtatccagaacattccgggtgaactgatcgaggcggcaaagatggatggtgcaaacagctggcagctgttaaagaaagtaacgattccgatggttatgccatccatcacaatctgtacattcctgacactgacgaactcctttaagctgttcgaccagaaccttgcattgacagcaggagagccgtcaaataattcacagatgcttgcgttaaatatctttgatacattttatggaagaaatggatgggaaggtgtcggacaggcgaaagcggtgatcttctttatcatagtggcagtcatcgcactggcacagaaccgtctgaccagaagtaaggaggtacagcagtaatggcaaaacagacagacaatcaggtaagtgcagtaaggcgtgcaaaacacggatggatactgacactgtttttcagcattttagctgtattttatctgtatccgatttttttggtgctgatcaactcgttaaagaaaaaaggatttattatgaaaagtccttttgcacttccggatgagcgttctttcttcggtatgacaaactttgtaaagggaattgagaagacgaatttctttgcagcatttggaaactcagtcattatcacagtaggttccgtggcagtgatcatattctgcacatccatgtgtgcatggtttatcaccagagtacataataaatttaccatggcactttacatgttatgtcttttctccatgatcgtgccgttccagatggtaatgttcccgttatctaagctggcaaacatgatgcatttgagcaacccgatcggtattatattagtatatctgggatttggagcaggacttgcggtatttatgttctgtggatttgtaaagagcattccgttagagatcgaggaggccgccatgatcgatggctgtacaccaatccagaccttcttccaggtcgtattcccaatcatgaaaccgacggttatcacggttgcaatcttacaggcaatgtggatctggaatgattatctgttgccgtatctggtacttgacctgaaaaaatataagacaatcccgattgtaatccagtatttaaaaggcggttacggtgcggtagactggggtaccatgatggcgatgctggtactcgcaatcatcccgatcatcattttttatggaatctgtcagaaatatattattgaaggagtagttgcaggagcggtaaaaggctgatatcttattaagaaatgtatattttttgttgaaatttgacaaaaattcaaatttcacgaaaaaatacgaaaaaatagtagacaggaatgaaaaatatggttacgataaaagacatagccagggaatcaggatattccgtcagtaccgtgtcgcgtgtgctgaatcacagaaatgatgtcagtccggatgcaaaaaagaaaatcgaaaaagtagtcgcagcgtataattttgtgccaaacaataatgcgaaacatctaaaacagagtaattccaaatccattggtgtgctggtaaaaggtatccaaaatatgctttttgccagcatcgtggaagaaatccagtgtatgattgaaaatacagactatacgctgatcgtatcctatttagatgaggatgcagatgaggtggagcaggcagttctcctctgcagggagagaaagccgcttggactgctctttttaggaggtaatccggagtatttcaaaaaagaatttgcgcaggtcgatgtgccgtgtgtgcttgtgacaaaccttgcagaccagatggattttccaaacctttcttctgttgcgacagacgatattgccgctgcaaaatgtgcagtggatgcgttatttgatgcagggcatacaaaaatcggtattttaggtggtgatattgaaaaatcatacaccagtcatcagcggtttattggctgtcagcagagctttcttgagcatgatatggtgtttgtgccagagaaaagttacgaaaaagcacgattttcctatgacagtgcatatcgtgcgatgaaacgtctgatcgcacgatgcccggatatcacagcggtgtttgctatgtcagatgtcatggcgatcggtgcgatccgtgcattgcgggatttagaataccgtgtgccggaggatgtgtcggttatcggatttgacggaactgcactggcagaatattacaatccaaaacttgcaacgatcaaacagcagtatcagacacttgcaaccagaagtgttgagatcctgtttggacagattgagttaaaaaggagtcagatccatgagatcgtcccgtttgaactggcgagtggagagagtattcaaaaaatcaggtaacacatacagatagtaggaggaacaaatattatgaggaccagcggtgtgctgatgcacatatcttccctgccgtctccttacggaatcggtactatgggaaaagaagcaagaaaatttgcagattttttgaaaaaggcaggtcagaaatactggcagatcctgccaatctgtccgaccagctacggagattccccgtatcagtctttttccagctttgcaggtaatccttattttattgatttagaatatctttgcaaagaaaaattactgacaaaaaaagaatgtgaatcattttcgtggggaaccaatccgcagtatgtggattatggtcagatgtatgtctcacgatatcctttgttaaagaaagcatatgacaggttcaggaaaaatgagccggaagattttgcagcattctgcaaggatgaagcagagtggctggatgaatatgcactttttatggcattaaaagatgctaacggcggtgttgcatggtttgagtgggaaaaagacttaaaaaccagaaaaacggaagccttaaaagaagcgcgggttacctatgcagaagatattgcgttttataaaatgttacagtatctgttctttaaacagtggtgggatttaaaagcgtatgtcaatgatcttggcattgagatcatcggtgacgtgccgatctatgttgccggagacagtgctgatgtctgggcaaatccgggacagttttatctcgatgaggagttaaatccgatcgatgtagcaggctgcccgccggatgcattctcggcagacggacagctctggggcaatccgttattccgctgggatgctatgaaaaaagacggttacagctggtggacgaagcgtgtaaaagcgatgtcaaaattatacgatatcgtccgtatcgatcatttccgcggtttcgattcttactatgcgatcccggcaaaagatgatacggcgagaaatggtgagtggagaaaaggtcctggcatggatctgttccgtacgatggagaaaaaactcggaaagttaaatatcatcgtggaggatcttggtttccttacaccttccgttttaaaactggtaaaagattccggattcccgggaatgaaagtcatccagtttgcatttgactcgagagagggcagcgactatctgccgcacaattatgagaaacactgtgttgtttataccggaacacatgacaatgatacgttgatgggttggatgaagacggctccgaaggcaagtgtcaaatttgcaaaagagtacttgaatctcacggaagaagaagggtttaactggggtatgatgcgcgctgcatgggcatcagtcggagatatggcgatcgttccgatgcaggatctgatcggaatcggatccgagggacgtatgaatacaccatccacacttggcggcaactgggagtggagagcaacttcagaccagatcaccggaaaacttgcaaaacgtctctataaatatatggagatgtatggacgtttaaacaaagatcaggaagaggaagaagaaaccgaagcggaggagaagaaagtatccgcagaggaaaaataacagaccgcatacaggtctgatggcatgaaaaacagaagtttagaggggggattctgaccggtcacaggttagaatcctcctttttatattatgggttcctttttgtcggaaaatgttttaaaataacaaataatcgaaagcttatatggggggatacatgctatattttattgtcaatgaaaagtcaaaaagtgggaacgcaaagcagatctggaaagagatcgaggaagtgcttaaggtgagaaacgtttcctatcaggcatttgtatcggagtaccgtggacatgccggtaaactcgctgcagagatctgtgccatggatgacaatgatatctgcctggtcgcagtcggtggggatggaacggcaaatgaggtgatcaatgggatcacggattttgaaaaggtacgtttcggcgtgatcccgaccggttccggcaatgatcttgccagaggattgtcactctcgaaggatccgaaaaacggtgccatacatattttaaatgcgatgaaaaaatcgcgtgaggatacctggtgtatggatttgggagaggtgaactttggggagaaaaaaagactgtttgccatcagcgcggggattggactggatgcgttagtctgtaaaaaagcattaaaatcaacgatcaaagatatcctgaataaaatccggcttggaaaactgacgtatctggtactgaccgtgcagtcattatttacgatgcagaccgcggatgcagagatcttttttgaccgggaggaaggtttacagaaaaaaagaatgatctttacggctgcgatgaattttaaagctgagggaggcggtgtgccgatggctccggcagcatccgcctgtgacggggaattatcattctgtgaagcagcggggatcccgaagtggagaacatttctatgtctgccgtttttagtggcagcaaagcatacgtctatccatggattttctgtgacggatgccaaagactgtacgatccgtttaagccgtccgatggttgtccatgcagacggggagtactgtggggaagtgacggaagttcatttccactgtctgccgggaaaacttcgcgtgttaaaataatgaaattgcggacactgccgtcataaacaggcgttcttcttcataaaatgttacaacatatggaggagaatatctgatggaacatttcagtgataacagggaatttgacttataccgggatatcaatacccgtaccaatggagagatctacataggagttgtggggccggtgcgaaccggaaagtccacatttattaaacggtttatggatcttatggtgcttccgtttatggaggatgagcatgcgcgggagcgcactatagacgagttgccacaatccgcggctgggaaaacgatcatgacaacggaaccgaaatttatcccgcaggaggcggcagagatcattttgccggaactgccggggagcagtgccagcatgccacagccggcactttcgcagtctgtactgccggggactgcaatacagggatctgccgcacagccgaagataaaggtgcgtctgatcgattgtgtcgggtttatggtggagggagcatccggtcatatggaaggaaatgaaagccgcatggtaaaaacaccatggtcggagcaggaaattccatttacgacagctgcgtcgatcggtactcagaaagtgatccgggatcatgcaacgatcggaatcgttgtgacgaccgatggcacgatcggggaactgccgcgaaatgcatatgtaaaagcggaagaacagacggtggaggaactgaatgcgatcgcaaaaccatatgtcattctgttaaattcacagaaaccgtacagtgatgagacgatggaacttgcagccgaactgaaagaaaaatatcagactgccgttttgccggtcaactgtgagcagctgcggaaagatgatattgtccgcattttagagaatatcctctgtgaatttccagtgacgcgtgtcgaattttttattccaaaatggacggaaatgctaaagccggagcatccgatgaaagcggaaatcattaaaactgcatccgggattttagacagtatgcataaaacgggagatgtaagagcactttcctttacaccggagcagtatgtttcgcagatcaagatcgacgagacggatcttgcgaccgggcgcgtggtggtgcggatggatttagacgataaatattattatgaaaatataagtgaactgactggtgtgccgatcgcaggtgaatatgagctgatctccatgataaaagagatggcagggcagaaagaggcttatgaaaaagtgtcagatgcttttgaagcggttcaggtaaaaggttatggcgttgtgagtccgggactttccgatatcaaaatggaagagccggtgctgatccggcatggcaataaatttggcgtcaaaatgaaagcggtatcgccgtcgatccatatgatccgtgcaaatattgagaccgagatcgctccaattgtcggcagcgaggagcaggcaaatgatctgatctcttacatcaaacagggacagcagagcgaagagggtgcatgggaaacaaatattttcggcaaatcggttggagaactgatggaggatggaatccgtaacaagatcgcaatgatggatgatgaatgtcagatgaaattgcaggatacaatgcagaaaattgtaaatgataatactggtggtatggtatgcattatcatttgatgcggtagtattgcgaaaacaaacgtaaaatcaaaaataagtaaccttaaaaagaaaagagaaaaacagatgaaaaaatttattcagggaatgtatcagaaaaagaattttggggtaaggctgactgctgtgatcctgtccgtaattgtgatgggatttgcactgtcgttgctggtgcttgtggatcttggaacagatccctgtaccagcatgaatcttgctatttcggaaaaaattggaatgggaatcggaaactggcaggcactgctcaatacgatcatatttgtctttgtcattttgcttggcagggaaaatatcggatttggaacacttgccaa

SEQ ID NO: 5146 - DNA, 24448 bp, Unknown
  gut microbiota DNA sequence
gatattgcctctgacaacacacgaccattctgtaagtccgatatacctgtaaagcagaagaaccaatcctccgctgactaccacactggctgccgaaaacaataactgttttgcaaaaagacggaacccgccataaaaattggctgattccgtctttttctatgattcatccgccattgccgcatcatcccgcgattcaatgacgatcaatattccattttcaaatgtaatttctgcctgttcttcagttatctcattactcacaccaattgaacagaaaccctttaagcaataatcggcaagcggatatttaaatcccgcaagatacagatgctctacctgcgcggtatacggaatcagggaaacatattttccaaactgttcctctttttttagtaccatgccgtgatctgtcatacggatacggttatttgcatccagcagttcaatttcaactcccagctctaaccctatgcccagaagttcaatattccccagcacatgatctaaccttgaaccggtaccaccaagcactgtgatgcactccgctcccatggaaattgcaagacgcagcgcaaattctgtatctgtgtcatccttttgaggattcaatctgtgccagacgatcccttcttttttctgaaaccattccagtgtctctttgcttaccgaatcaaaatcgccgataatgacctgtggaacaatttcatttctccgcaaaaattccataccggaatctgcagcgatcactgttttttcagcaaagccttttaaaacctctatcgcaaatgcatcttcaatttttccacccgctatgataaaaaaatgtttcatccatcggctcccatcattcattaataatatttaagaaacgaatcgtattctcggtcacatccccggaaaaaattgcactgccagcaacaataatatttgctcctgcatccatcaattcttccacgtttgacagatttacgccgccatctacttcaatgtccgtttttaatcccttctcatccacgatttttcttaattcacggactttctccaccgtatagggaatcagtttctgtcctccgaatcccggatttaccgtcataacaagaaccatatccactttttcaaggacacaggatattgcagaaactggtgttgcaggattgatggcaacacctgctaaaagtcctttttctttgattttttcaatagtacggtcaagatgtctgcagctctctgcatgaacagtgataagatctgcaccagcctcggcaaactcatcaatatagcgtcccggttcctcaatcatcagatgaacatcaaaaatacggtctgtacatgctcttatagcacggatgaccggcattccaaatgaaatactcggaacaaacattccgtccataacatcaatatggacatactgtgccccggcttcatcaagctcttttatctgttctccaagacggctgaaatcagccgataatatagatggcgataaacagttcatttttttctccgtaatcttagtcatttattttaatactttcggacagcctttaattcctcatacagcaatttatagttttcataccgcagcaaactgatacttccttcttctaacccctgtcttacaccgcagtccggctcactgatatgattacatccctgaaatctgcaatatggttcccatttccggaattccggataaaacccttttaagtcttctttttccattcccggaatgtaaagtgtggagaatcccggtgtatccataatataagtatccccgccgatcggtatgatttcagaatgacgtgtggtatgtcttccgcgctcgatcttgcagctgacttcccctgtctgcatggtgatgttcggctgcaggcggttcacaagagaagatttgccaactcccgatggtcctgccaccgccgctgtttttcctttcaaaagttctaacagcgcgtccacacccttttcctcttttgcactggcaaaaagagtccgataaccacaagctgcataaatatccgcaaacgcatgcagttcctcctccgtaaccagatctgttttgttaaaacagattgcaaccggtacattctgatattccatcataacaaggaaacggtctaacagattaaaattaggctgtggttttgccgccgcaaaaatgatcagcgcaagatcgatatttgcaaccgcaggacgaatcagctcattttccctcggcaggatcttttcaatatttccttttttatgttcctcatctaacacagcaatctcgacattgtcccccaccagtggcttgatgttctggtttcggaatacgccttttgccttgcactcataaattccggatcccgctgcatgaatgtagtagaatccggaaattcccttgataatttttccctgcataaatcttcctattgtctttattcttcctggaactgtacatcaatcgtctggtcttttaaatcatttccatttaagtccagccaggtaactacgattttaccactgtccgaaagaataccggtctttgtcagaatcagtccgccagtaccaaaatctgcaatcgttttgccgtaccaggtctgtaaaacattgccctgatcatcatataaaacaatgtctgcaccggagatattcgatgtatctgatggaagctgcaggctgacattcagcttataagtctttgtggtgatctgctgtgccggttccggtccaagactgactgtgatcgtgatggatgctcccggatctgcctgtgttcccgacgcaagtgactgtccgattacgattccggcatccgtatcactgtattttgtgaccgttgaaacattaaactgtgataaaagttctttcgcctgttcctctgacttatagcttgtcgatacatcaggtactgtaatcttctctgagccaaggctgatctcaagtgtgatcgtatcgccctcttttcccttggtatccccatttggtgtctgggaaattacatatccttccgcaacggaggaactgtaggaagttgtctttgtgacctgaaatccctttgccgtcaatgccgcactggcatcagtttcactctgtcccacaacgtttggtatttcgaccgtattctcactggttccggcggcagatccgctgctgatgataacttcgatcgttgtattcttttcaacagtcttaccatctgccggatcctggcttatgatctgtcccttttctacggtatcagaggatgcggttccagcctgtctgatgccgagtccggttccgtttaactcctgttttgcctgatccatggtttttcctgtcagggaaggtactactacaccgtccttgatctgggtactctgactgtctcccgtctgtgtttccgtttttgttgtttctgtattcgaagaattgttcttgttagacttcatacccccggctaacgtgatgcacaggtaaataatgatgataatgatcactacacctgctgcgattcccatgatcgtgattgccttttccatcttcggattgatatcaccatcctcgtcatcaatatcatcatcgtcgtcctcgtcatcatcatcgatcaccggctcctgtattttgatcgacgccggatctatatagacgtttgcagtctgtttcttgatctgatttaaatcatctgctccgatcaccctcgtcttatcctgatttgcaagaggtaccatcacaacaaaatcctcgttcgggctgatcagtgcttttctaagatcggccagaagcgctgtcatggaagcatatcttctgtcagggtttttctgtgtacattttaagatgatcttttccatactgattggaagatttggtgcataaacacttggcggtactatctcttcctgcagatgctggattgcaacggcaactgtcgtatctccgtcaaacggaacacgtcctgtcaccatctcatacatcacgatacccagtgaatagatatcactcttgccatccacaaatccgtttctcgcctgttccggagaagaataatgtacggatcccatcacatccgaactgatcgtatttgatgttgctgcccgcgcaataccaaaatctgttacttttacttttccctcagtggagatcatgatattctgcggtttgatatcacgatgcacgatatttttattatgggcggcttcaatacctctgcccacctgaattgcgatgctgactgcctccttaaaagaaagctgtccttttttctcaatgtaggtctttaatgtgattccttccacatattccatcacgatataatgcaggccattctcactgccgacatcataaatatttacaatattcgggtgctctaaccctgcagctgcctgtgcctcggaacggaatttcgttacgaaattaatatcctcggaaaattctgcctttaataccttgattgctacaaatcttcccagtgtaagatcttttgctttatatacatctgacattccgccagcgccaactttacctaaaatttcatagcggtctgctatgtacataccttctgtcaacattctttcacctcatcagaaaatggttctatcaatacaaccgtaatattatccttaccaccatttcgattggcagtctcaatcagcttctctgctttctcaacaatgtccctctgtcccaacacaatatgccggatctcatcatcttcaatcatatttgtcagtccgtcggaacacatcaaaatctcatccccaggttttaaactgatctcaaagaaatcagctgtcacctccggcaatacaccgactgcccgtgtaatgatatttttatccggatgatctttcgcatcttcttttctcacttcacctaaacgaaccatttcctcaaccagagaatgatcccttgtaatctgtgtaatatcttcctgattgatcacatacagcctgctgtctccaacatttgcggcatagagtgtattcccgatcaccgttgcagcaacgatcgttgtacccattccatttttggccggatctgcctgtgcctctgtcaaaagcagactgttcgtcatggaaacagcactcttcataatcgccaccggttctttttcacccgatttaccaatcagttccacaagtttctcaactgtaaacctggaagcataatcacctgcagcgtgaccacccattccatccgctactaaaaaaagattcggcagatttcccacagcggtctctgatgtaaacatataatcctgattcatttcccgtcgctgcccgatgtgcgtcatggaaaacgtcttcatcttctctacttcctacctttctgcatggctgatataacgtttgcgcagctgtccgcatgcaccgtctatatccctgcccatttcccttctaattgtaacgttaatcgcatttttttcaagcctatttttaaaattaagaattgcttcatgatccggctgcacatatgaacgctctttgatcggattgaccgggatcaggtttacatgacaattcatgccatgaatcaggtctgcaagccttcttacatcctcatcggtatcattgacaccaccgactaaactatattcaaatgtgacacgccttcctgtctgttcaaaataataacgacatgcctcaattacttcatgtatctcatatttattggcaaccggcatcagttcaagtctcttttcctgcgaagatgcatgcagcgaaagtgccagcgtgatctgcagttttttatccgccagttcccgcattttcggaacaataccgcatgtcgataccgtcacattccgctggctgatattcagtccattttcatccgtcagaagttcgataaacttcagcagattatcaaaattatccatcggttctccggttcccatcacaacaacatttgcaaccctctccccggtatctcttgtgatccggtatatctggtctaacatctctgacggcgtcagtccccgcaccagtccgtctaacgtggatgcacagaaccggcagcccatccggcagccgacctgcgaggaaatgcagactgaattgccatgtttatatcgcatcagaacgctctcgatcacgtttccatcatctaatgcaaacagatattttctggtaccgtctatctttgagatctgtaccgcctcctgctttaaacttacaaagcggcattcatttttcagtttttcctgaagggattttgacagatttgtcatttcatcgaaagatgctgcctgtttttcatgcatccactgatacagctgtttggcacgaaacggtttttctccgatagattccatatatgattttagttcttccagattcatggatttgatatctgttttttcctgctgcataatttcctcttttccattttctttccgggtggctatgagatacgtcttaatctggcgtagaaaaatccatctcccacctgtgttcccggataaatctgttccatatcaagcagttcaaattcaggatgttttcctaaaaaccacgcgacattctcctgattttctcccgggttgatcgtacaggtagaatataccatgatcccgtcctttttgacataagaacagaccgtatctaagatccgacgctgaagtgcttctaactcttcctgctgcccccggctcattttatagcggatgtctgtctttttgcgcagaacccccagaccggagcatggcagatctgcgaccagcacgtccgctgtatcttctgcactctcgtccggcaccgtggcatcccacacttttgtcgtcatattttttatctggtaacggctgatattttcctcgatcagtccggtcttataccctgtcaggtcacgcgactccacacttccggtgccgtccagcatctccgcaagatgaatgctcttgcctccgggagccgcacagacatcgatcacatgtgcgcctttctccggtgctgcggcctcagccaccatcatggaactgatatcctgcacataaaaaagaccgtcctgaaatgatggaagtgccatcagatgatcaaaatctgaaattgcaaatgcatagtgatatgcatccgtatatggcagtccggcataagaaagttcttctaacgtctgcaccgtcacgccttcggcttttaactgttcctttaacgcatccggcgtaattttggtcacattggtacggatcgtaatcggtgcttcctttgaaaaagcatctaaaattgcctttgtctgctccatgccataggcgttaagccattcttccacaatccactccggcatggaataacgcacacttaacgccagaaccggctccttttcttcatccggataccggatggaaccactgtttcttgcaatatttcgaagcactccgttcacaaaaccgctcagtgtggaaaaaccgctttttcttgccaattttaccgcctcattgcaggctgccgaatccggtacggaatccatatactgtatctgatacacacccattcttaaaatattgcggatgaccggtttcatttttttcactttcacttttgagaactggtcgatcacataatcaagttcgatcatgtgctggatcgttccctccaccagtcttgtcagaaacgcccgctcatatttttccatatactgatatttttcgagcacggcacggagcacctgattgctgtatgccccatgttccgtcacctcaagcagaacatcaagtgcaagtcttcttgtatttacggtatcagtcatcacgattacgtcctccaaataaaagaaccagccttaacagctgtaagattgctgccgcagcacttgcaacataggtcaatgccgcagccttcaatacttttctggtataaggcagttcactgtctgataaaattccctgctcacctaaaatatggagtgcccggcgtgaagcattaaactctaccggaagagtgacaagctggaataatactgcaaatgaaaaacataagattccaagattgatcagcattgcaccggttgagcggttaaaaaacagaccgatcagaattaacggccatgcaagtgtagatccaatgtttgcaaccggaacgatcgccgtgcggagtgtcagaggcacatagtttttctgatgctggatcgcatgtccacattcgtgcgctgcaacaccgatcgctgcgacagaattgcttccgtatacggagtcagacagattcagtgtcttttttgacggattgtagtgatcggtcagacttcccgatatatggcagaccgtcacatcatagataccggctgaatttaaaatacgttccgccgcctgtgccccggtcataccgctcatactgcggtactgggaatatttattgaaagtactctttactcttgcagatgcgatcaggcagatcactgcgccgatcagaaccaaaacataagtcggatcaaaaccataatagtaataaggcatatcaggttacctccattcattaaccacgtgtaaaataagttccctcttccaccgtatagccatttaaaaatgcatccgtggtcatacgtttttttccttctaactgtacctcaagaagctctaagacaccgtctcctgtctgtaccagaaaacttcccttttccgcttttatgatgcatcccggagccgctttcttttcatccggcagcacatttgccctccatatcttaagtgtctttccgtcaagtctcgtatatgcacttggccacggatttaaaccgcggatcagacattcgatctctttcgcactcttcgtccagtcaatacttcccaactctttatggatctttgctgtatgtgtggctttactgttatcctgtggtgtgtaaacagccgttccattttcgattgcttcgatcgtctttacgcagagttctgctccaacctctgcaaggcggtcaaataaacttccacctgtctcatccggccggatctccactttttcttctaaaatgatatctcccgtatcaacaccttcgtccatgcgctgtgtggacactccggtatacggatcgccgttgatgacagcccactggatcggtgctgcgccacgatattttggcagtagcgatgcatgtacattcacacatccatattttggcatgtctaacactgcctttggtataatctgtccaaaagccaccacgatcatgatatctgcatggaacgatttcagatactcgatacatgcgctgtccctgacacgctccggctgatagacctcaatgccgtgtgcgatggcacattccttcaccggcgtatattttaatgccttacttcttcccaccgctttatccggctgtgagacaaccagcacaacctcatgaccggcttttatgatctcttctaatgtccccaccgaaaaatccggtgttcccatgaaaattactctcattgtttattcctccggatcatcataagttacatcatgtaacggtccttctacgatctccgtgtacatatgtccgtcaaggtggtctaactcatgacagattgcacgtgccataagctcggtcccctcgatctcatattcttccatattttcatcaaacgcgcgtgccttcacataattcggtcttgtaacggtacctgcttttcccggaagacttaaacagccctcatccccagtctgctcgcctgacttttccagaatcaccggattgatcataacaaccgggccttccccgatatcgatgactacgattctttttaaaacaccgacctgtggtcctgcaagtccgactccgtttgcctcatacatggtatcaagcatatcgtcgatcagttctttgatctttggtgtcatttcggtgatttctctgcattttttggtaagtacaggatctccctgtattctgattgttctaagtgccattcttttatcctccattttgtattttacaattttaaaatccgttgaccgggttaaagtcaaatcctactgctacattctgatacagacggttgtcttttataaaagcttccagaccatctttcaatatgacaagtgtctgatactctcgggttttcacatagatcactttgcggtagacatcggaaatttttgcaacaggtgcatctgacggcccgattgaaaaaatcttttcactgttttctctcactatctgatcgattttccccatcaatgccaccgccgcctcacttgctgccgcctcgtttttcgacgcgcacaaaatataaagcatgttccacaccggcggataccgcatcattttgcggtactcgatctcctgcccgtaaaaagcctcatagttctgctcttttgcagtcgtgatactgtaatgatccggatcatacgtctgtatgatgacattgccgggaatgtcacctctgccggcacgtcctgccgcctgcgtcaggagctggaaagtccgctctgacgcacgatagtcactgatataaagtgaaaggtctgccgcaagcacacccactaacgtaacccccggaaaatcatgtccctttacgatcatctgtgtaccgatcagtatatctgcctcgtgatttgaaaatgcagataatatctgctcatacccatctttgattctggtggtatccatatccatccggagcacacgcgcctgtgggaaacgcgcctttaccacctgttctattttctgcgtgcccgccttaaaaccactgatatacttagagccacagaccggacacaaaccgggctgtatcgtcgtatatccgcagtaatggcagactagacgtgtcgccgcgccgcttccatgctggctcagtgaaacatcgcaatgcggacattttatcacatgaccgcaggctctgcaagagacaaagcctgccataccgcgccggttgataaaaagcatcgtctgttctccctttttcagacggtcctccatcagctcactcagacggtcacttaagatcgagcggttgcccctccttaactcctcgcgcaggtcgatgatctcacacaaaggcatggggcgcttttgtaccctgtgttttaattccaacaggcagtactcgtcattttctgccttataataactctcaagggaaggcgtcgcggagcccagcaccacgaccgcatctgtcatttttgcccgctgtattgcggtttctctcgcgtgatatcttggcacggtctcactcttataggaagcctcatgctcctcgtctatgatgatgattcccagcgccggaaatggtgtaaaaagtgccgaacgtggtccgatcatcacagaaatttctccgttttttgcgcgttcaaactggtcataccgctccccggccgaaagttttgaattgatgatggatacctgtgcaccaaaacggttgtaaaaacgccgcaccgtctgataggtcagcgcaatctccgggatcagaacgatcgcctgttttccctgcgcaagcacatgtgcaatcagttccatgtagacttccgtctttccgcttccggtgacacccttgatcaggtaagtcttccgctcacctgcatcgtactccatcgtaattttcgagacgacattctgctgctcctcattcagcttcttttgttccccgcccggatcaagaccgccgaccggattgcggtatgcggtcttactcaccacttttacaataccggcttcctccatcgcacgaatcacggacgcggaaacagacatctgctgcgttgccgtatcccactctaactcccgctgttctaacaatgccacaagaagttttgcccttgccgttttatgctttctctcacattccgcaagctcatttttcgcttcgaccggatgcagtgcaagtcttatcgttttctgttcttttgccttctttttttctttgaccggcagtactgtctttaaggcatgattcatggtgccgccatagttttccctcatccatcctgcaagggcgatcatctgcgactcgatcaggacaccgccctttacaatcgaaaggatctctttgatcttatcttcctcatactcgcagacatccgtcagctcgatcacataaccctgcatttttcttgatccaaacggaactgctaccagcataccaactgcgattgtactctttagtctctccggcacccggtattgaaacgtcttatctaattttccctgataaatatccacaatgatatttgcatattctgccattccaatttccatgcctttctttctatctgccacgtccttctgctgctttctttaccagttctttgtcctccatcggataacggacaccaccgatctcctgatagtcctcatgcccttttcctgcaaggacgataatatcgccctccctggcatgatcgaatgcatatgccaccgctgctctccggtcagcaatgcgtatgtatgcccctctcgtaccctttatcccgctctcaatgtcatctaagatcagttccggatcttcccaccttggattatcggatgtcaggatcgtaaaatccgcgagtcttccagctgtctcacccatcctgcctcttcttaattttgagcggttgcccccacagccaaagatcacgacaagccgccccggatcaaagccccgcaatgttccaagcagattgcgcaggctcatctcattgtgtgcataatcgaccagaaatacaaatttatctgatatcctgacgttttcacaccgccccggcacagtctgtctttgcagtgcatcctttaccacatcctgtgctattttaaaatgacgtgccacaaggatcgcagctaacgcattggaaacattaaaaattccgggcatctgcaataggaattcttcttttccatccgtaaaaaagtggctgtataaccttccttctttcatggaaaaagtgatcctttctgccacaatatccgccttttgtcccggggcatccacaccgttttctcccagcacggaaaaagtttctatgtcacaggtatgaccaaacagtattttttccgtattccggtcatcacggttgacaattcctgcctgacactgccgaagcagccggcttttacagtacagatactctgcaaatgatgcgtgttctcccggtccgatatgatccggttcaatgtttaaaaacaccccgatatcaaaaaaaatcccttccacacgctgcatcttgattccctgtgaggatacctccatcacacagcacacacatccgttgcttaccatctgcgctaattctctttgcaggtcgctagattccggtgtcgtatgtccggccttttttacatctttcccgttatatgtccatatcgtacctaccatgccggtcttgtatcccgcttcttttaaaattcctgccgtaagaaacgccgtcgtcgtctttccttttgttccggtgatcccgatgatcttaagcttttttgccgggtaatcgtaaaatgcagccgaaatctgcgcaagagcctgcctggtatccttcacacctatcacagccataccgtaattgcgcacgagttcatgcacgcgcacttttccatgttctgtgtaaatgaaacattcccagcggacatttaccatacagctttcatccaccaccactgcaaatgcccccgtttttaccgcatccataatataatcatgtccatccgtgtactgcccctttatacagacaaacagggacccccgctttacttttccggaatgataacagatatccgtaatgataaggtcgtggctcccctgcacgctttcgtatgaaaaatgtttgagtaattgatctaaccgcattctctttcctcaagaatacactttttttattatatgacagaacgcctgtttttacaagttttccgcttttattttagaaaaaagttacatatttttaaattccgtgtgacatactgataccatgattttatataaaagggacatgcaaatatgattacaaaaaacttctttgtctgcggactgaccggctggtgcatggagattctttttacctccacaggctcttttttgaaacaagataaacgtctgattgggcggacatccgtatggatgtttcccatctacgggactgctgccgtaattgcaccgttgtaccacagtatcaaaaatcttccggcacttcttcgcggctgtatctattccgttggcattttttcttttgaatacatcagcggcacatttttaaaacgccacggcatgtgcccctgggattacagtcatgccaaaacaaacatagacggggtcatacgactcgattatgctcccttgtggatggctgccggacttttatttgagcgcattctcatccggtgtaacacctcggaatccccctgaaatttttattttcaattactgatatataaccttccctgtctgaaaatatctgaaaacggacgcatattttatcaatataacgtaaatttttttcttcttgaaatcagatggtgattattatatgatagaaaaaatgctgaaaaaagtcagcatcacataaggaggatttatatgcgtcatttaatgagcccattggacttctccgtcgatgaattagacaagcttttagaccttgccaatgatatcgagaagtacccgaacaaatatgcacacgcatgtgaaggcaaaaaattagccacctgtttttatgaaccaagtacacgaacccggttaagttttgaagctgccatgttaaatcttggcggttctgttttaggtttcgccagtgctgattccagttccgcatccaaaggcgaaagtgtttccgatacaatccgagttatctcctgttacgcagacatctgcgcaatgcgtcatccaaaagaaggtgcacctctcgtagcttcccagaaatcaagaattccagttatcaatgccggcgacggcggtcatcagcatccaacccagacattagccgatttacttaccatccgttccttaaaaggacgtcttgacaatatgacgatcggactctgcggtgatttaaaatttggccgtaccgtccattccctgatcagtgccctgatccgttatccaggcattaaatttgtactgatctcaccggaagaactgcgtattccaagttacatccgcgaagatgtcctgcgtgcaaataatattccttttaccgaggttgagcgtttagaggatgccatcccacagcttgatgtcctctacatgaccagagtccagaaggaacgtttcttcaatgaggaggattacgtccgcttaaaagatttctatatcttaaccaaagcaaaaatggagcttgctccagaagacatgatcgtattacatccgctgccacgtgtcaacgaaatttccgtagaagtagatgacgatccgagagctgtttatttcaaacaggcacagtatgctgtctatgtgcgcatggcgctgatcttaacgctgcttgaaattaaggttaaataaggaggagaacaatgttaaatatcagtggaatccatgagggatttgtccttgatcatattcaggcaggcatgagcctgcagatttatcatgatttgaaattagaccagctcgactgcccggttgcgatcatcaaaaatgccaagagcagcaaaatggggaaaaaagacatcttaaaggtagaatgtccgatcgatgcactcgactttgatattttaggctttattgaccataatattaccgtcaatgtgatccagaatgataagattgtctccaaaaaagaacttcgtcttccaaagcaggtcaaaaacgtgatcaaatgtaaaaatccacgctgcatcacttcaatcgaacaggaattagatcagatttttattctgaccgacccggaaaaagaagtataccgctgcaaatactgtgaggaaaaatatacaaatccaaaccgccgttaacaataaaatactgccggatccatcaatccggcagtatttttcgttccagtattttatgtttttccgtggcaagactttatcccgcttctaaaacggccttaaacaacagcagttacagagcatatttaaaaacagcatgctaagacaccagttacccgcactcgaataaggtctgtcatagctgcttcccatattcgtataccatgttccgccatactctaaatgctgcaggaactgccggtattcaaaattgcttggttccatctccactgcacgcgcggcatgctcttttgcgatgatattatttcctgccccctgatttgccatggcactgtaataataccagcgtgcacttctctcagagaaaggaattccgtttaaaacattaagtgcctctgcataacagcggtttgctatgtaatttgcagcagcctgcagcttcggattttcagtactctgattataatagtaactctgtccgcccccatatccgtaactgtttcctgaattatatccatagccgcttccctgctgcttttctttcataatctggtcatacgcctgctgtacttctttgaacttttcctccgcctgtgccttgttcggattattgacattggcatccggatgatacttgcggcttagggaacgatatgctttttttatttcttcatcggaggcacttcgtgacacaccaagtacctgatatggatccatcataaatcaaacctcattgtttatgctcttttttctttgctttttcctcaatcctgcgttttttgatctgcagatattcatatttcgaccacacacccgaatacaggatattgcgcagaatatccgcatgcaaaagaatcggcagacgctcaaacgatttcgcacactctgacatcatacttgtcaaaagcagccggcaccaggtatcaagatcctgcgcctgttcttcctgaacaaatgtgagcggattatagcagtttttcttcttatccctgtcataatcctcgtacgcatccatcaggtagataaactttcccatgtaaaatcccatcgtgcggagttcctctgcccattcgtcttccttccagcaaaacacctccgcaaccatctctccggtcagaccggcaacgagatcaagatttgtctcctggtgtttctcaacatccccagtctttttcatatattcctcaatggcacctacctgtctcggatattttgacatgatacgagtataatccttatccagcatttttgcaaatgccttcctggtatacgacctgtcatcattccagtcgtcaatcagattgtggtacgctaagatcagattcatatccgccgcatattttgtggcgtcattgatccatgcaatacgcttctgcgtcggatgcagcgcacatgtaaactttgttttttcattcggaagttcatacaaaccggtcagcagaacaatcagaaacgtcatatcatatgcaagcagcatctgtcccttggttccacaatttgatttcagttgtctgcaaagcccacagtaatatgcctgatatgcttttttgccttcttccgtcagctctttttgattgatattgatataaccaaacacaaggcctttctcctttgtcagctttttttaataaattctgttttacattttggacaggtaatgcagatctttcctcttcccttcggcaccctgactgtctgcttacactgcggacatttaaagaaacggtaagtactgcgctgtgcccagcgttttttcagattgtttttctttaccactgcccggtatttcgcatttaaatatctctggttctcttcgtaacgctttgacacattccgtgagagtattctgaaataggaataaattaacaatgcgaggccaagccagtataaaatatttacccggaaaaatgcagataaaaatgtggatacaagtaacagaaccatcgatacgataatctgtgcccgtgaaagatcgtccactccatatctgccgatcataaactgtcgtaatttttctttcatctatgacatccctttctacccagatacaaccgcgtgtaatcacatgcagccttatataactgcatgtatcccgtcaatcgcatttttatttatgtacggaaaaacggcacctttctggcaccgttttttgtccatgacgctatggtaaacccaatactcacaaacgtcaacattcctattatcttttaagaaacattttagattttggttatatttccacatatggatatcttcttatctattgatatctgatttaagcaggacgataagccgggttatgtctaaactgcagcaagccacagtcggaatgatcatctatctaggacgactgttaccagccgcctcaagcaacctacctaaagctggcgggccacgtcaacgcttttgttcggtcttgcttcggatggggtttacatatgccccctctgttaccagagaggcggtagtctcttacactgcccttccacccttacccggcatataccgggcggtatatttctgttgcactatccttagagtcgcctctaccggacgttatccggcatcctgccctgtgaagcccggactttcctcaccccgataaacgggccgcgatcatttgtcctacttaaatccatcatttgtcttccggcacattctgccagcatgacacccgattaactatacactttttttcttatttgtgcaagcctgattttcttattttctcttagacctgccgagacaaggttctttccatgttttacacattaaaacacgaaccgccgataaattcacggataatggaattctgtccgattccatccggagacatcggaaggaaataatccaggaactttaagagacgctttgcctcaaggtactccggacagtccttgtcgatcgcaaaaagcagcggttcggcatatatctttaatactgccagttcatagatcaatgcggaattaaacatcacatccgctccctcctgaaatgggaaaatattcttctcctcaccgcggcgcacggaatcccacatagcgatcgtttctttcgctgaggtacctcttgttcttgcatcgcgcacaatacggcggatcatccttccatccgtggtcggcagatagttgtgctcgtcgatatttagctgtgttagtgcgctgatatagatcttaaatttgctctccaccggaagggaataggacaatttatcattcagtccatggatcccctcaatgactaacacatcatcttttcctaactgcatgatcttatctttgtattctctttttccggtcttaaaattaaagatcggcagattgactgcttttcctgccagaagttcattcatgtcatggttgaaaagctctacatccagtgattccaggcattcaaagtcaagttcaccattttcatcacgcggacatttatcacgatccacataatagtcatcaagcggaaacggatgcggttttaatccctttgctgcaagctgtatggacaggcggtgtgaaaaagtcgtttttccggatgaagaaggtcccgcgatcatgataaatttctttccctcttccttaacgatcatttccgcaagtgcaccgatacgctcttcaaacaatgcttcctgtgtcaagatcatctcctgcgtttttcccgctgcaatggcatcattgagtgcaccgatcgtatcaatctgctgcagttttccccagtctcttgaacgttttaacgtgaaaaataatttatccgacggcacaaattcagaaacttttttcgcctcttttcccggaaataaaagtacaaaaccatcctgatatgctgtcacatcgtaatatctcaaatatccggtcgacggtaccataaacccgtaaaaataatccttataatgatccagttcgtaaatatttaccctggaactgcggcggtaacgaaacagtttttctttatctttcattccaagttcatggaacaaagctactgcctcatccgtattcatactgtatttttcgattggcaggtccgccatcacaagacggtacatttcttttttcaatgccccgatcattgtctccgtgatcttacagctttccccgtctttcatcagttcacagtaatatccctgaccgatggcatatctgacataaacgccaatatgctctctgccccacagattgtaaactgctttttgcatcagcagcgtaacacttctgcggtatgcacgctttccggtcttatcagacgttgtaagaaaagacaattcgccgtctttttttatggtcttttttaattcgcgcagtctgttattatacagtgcaagcacgatatcatcctcatactgatcctgatattcctgtgctatacttaagaaactgactcctgccggatatgttttttctttctccccgatttttacaacgatctgttcttctcccatatacaaggtctccattctcttcgcctgctgtcatttttcctgtccgtcccttctgacagaaaccggcttttctacgcagcctcgtttccatcaatgacagctcacgttctataatatgcaagcgcagcttcattataaccaagcgcttcttttacctcttccatgcgcacggctattttttctgattcaggctgtttaaaaagattgtccagaatgttttcaaacacctggcgttctttcaccagatattgatgcagtaccggatttttttccataagcagatatctgccgtataaacattcgaccttatatctgctttttttctgctctttactgttttccatatcttttattgctttatctgcatcttcgtttttctctgcctgatagtgtacacgcatcattggataatatttgccatcctcaaataccatgcgctctgcttccgtcacatatccattttcggcaagatactccctgacactgcacagttccgattggggctgcaggatcagttctcccgccgcctgacagatatcttttccttcttctaagatatgcatcacaagcccgccacccataccggcaaccagtatggagtccgcctcgcccttttccagtgctgcgactccatccgaaagcctggtctgtatgtatgcatccataccatataaatgaatatgttcccttgcgcgttccagtggtcccttattgatatccattgcgatcgcgctcttgatcttcttttgctctaacaggtagattggaacataaccatgatctgtccccacgtctgcaagcaccgcaccttcccggatcaacgaagccgccgtttttaatctgtctgatatctttaccatcttactccagataatcctttaacttgcggcttctgcttggatgacgcagcttacgcagtgccttcgcctcaatctgacgaatacgttcacgggtgacattaaattctcttccaacttcttcgagtgttcttgcgcgtccatcttcaaggccaaaacgaagtgtaagtaccttctgctcacgctctgtcagtgtgccaagaacctcttctaactgttcttttaataacgtaaatgcagcggcatctgccggaacaggtacattatcatcctggataaaatctccaagatggctgtcctcctcctcaccaatcggtgtctctaaggaaaccggttcctgtgaaatctttaaaatctcacgcacacgttccaccggcatgttcatctctgctgcgatctcctccggggtcggttcacgtcctaactcctgcagtaactgtctgctcacacggatcagtttgttgattgtctcaaccatgtgtaccgggatacggatcgtacgcgcctgatcagcaatcgctcttgtgattgcttgacggatccaccatgtcgcataagttgagaatttatatcccttgcggtaatcaaacttctcaactgccttgatcagaccaagatttccctcctggatcaggtcaaggaataacataccacgtcccacataacgttttgcaatgctgactaccagacgtaagtttgcctctgcaagacgtttttttgcctcctgatcaccaagttccatacgcttcgcaagctcgatctcctcctctgcagaaagcagcggcactttaccgatctcctttaagtacatacgcaccggatcttcaatggatacaccgtccggaacagaaaggtcgatcttctccacctcaatctcgtcatcatcatccacttcaagcagaatgtcatcatccgcatcatcatctgtgattcttaaaacatcgatattatttgcctcaaggaaatcaagaattttctcaaatttatcagagtcaagctgcatatctgcaaagaaatcactgatttcctgatactctaacatattttttttcttttttgcgagacttaacagctcttttaatttttcctgaaatttttctcttgctgcttctgcttccgcattatttactgcagatgcctccgctttttttccggaaaccttcgtattttcgttgttttctttcttttttgttgccattttgtttcatcctctcaggttttctactattttgtccttaatcaatggaaatatgcactttctctaattcttcaagtgccttcttatccgccactgaccgttgcagcgccgccatatcggtcggtgccatgttcttcaggtgatactcaatgctgttttgttttacccggacaatagtttcttttaatgctttttcaaacgtttctttggaatacccaccattttctttgtctccttctgtctctacgccgcggatcgtggcatgaaaaagacctgcgatctcgcgctgttcttcttcattttgaaacatactgacaatttttgccgggttgacagtaccggtattccgatactgttcatataatatttccgccgctttgtgataaatttcttctgtgaaatcttccggcgaaatatatttctcaatcttagggaacagtccggtatgttcgatcagccaggtcaaaagcagcttctgtgactgtatcataccgttttcttttttcttttcgctgccctgttctctccggagttccgatctttcacgcacaggaggtgctccgcctgccgccatgccgatctttgcaccatactggttgaccagcctgcgcagatcttcgataccgatcatatacttatctgctaccgcagcaatataattatcacgctctaatttttctccgaacgtgcagagtttttctgcaactgcattgtaaaactttgtcttgctctcgggatcatgcatatcatactgctgctctaagatacggatctcaaacataaaactgttttccgccgtatcgatccgtttctggtattcctctgcaccgagcgccttgataaactcatccggatccttataaggcttcatattgatgaccttcgtggtgattcctacttcttttaaaatcggaattgcacgaagtgccgccttcacacctgcaccatcactgtcataggtcagataaacattctttgtgtaccgctttaacaggttggcatgtccacttgtgagcgccgttcctaaagatgcaaccgcgttgtcaaaccctgcctgatgcagggcgatcacatccatataaccctcacacagaagaagctgtggtttcttggtgctccttgcaaaatttaatccatagagattccggctcttatcaaagatctttgtctccggtgagttcagatatttcggctcgccatcccccatgacacgtcctccaaaaccgatgactttgttgtggacatccatgatcgggaacatcgcccggttccagaatttatcgtacccgccgcgtctctcatcgatgctgaccaaaccggattcttttaagatgtcatcctcatatccttttttccgaagataccggtaaagatcatcgctgtactgatcggaatagccgagaccgaatttctgcatggtctcatctgacagttcccgttttcggaaataggaaagcgcgcgcacacctctctccccacgcagcagcatgtaaaaatactttgctgcttctttattaatttcaagcagtcttgctcgtttgtctgcttcctgcctctgtgcgctggtgtattcctgtttcggcaattccacaccggcacggtcggctaacgcttccatcgcctcgccgaatgtaaagttttcatactccatcagaaacgtaaatacatttccacccgcgccgcatccgaagcagtaatacatctgcttgttcggcgacacggaaaaggagcctgttttttcattatggaacgggcagagtccaaaataggtactgcccttttttgaaagacgcacatattgggaaatcacatcaacaatgtcattcctggaacgcacttcttctatgatgtcatcagaataatacggcatctttttctcctttcgttgtttatattcatcttacatctgcgaaattcaactccagtttccaacatctgcgacagattggcagctaaaacgaaagtacgcttgcgctgcgtgtcgctcgcaacggtactaagcgaccaaaacacggtcgctaaggaccggcggctccccagcactttcttattcagctgccaatctgccgcaaccactttcgatttcaatgaatttcgcaattgtaactttaatatccatctacctgccaggtcgtgtggcaatgccacaggctttttaatttc

SEQ ID NO: 5147 - DNA, 31467 bp, Unknown
  gut microbiota DNA sequence
aatattttcaaagggagactaaaatgaaacaattattaaaaaagatacttataatactattgtttactattaatatttctatgaattttcataataattcatcttattcttttaattactatgaaacaatgcccctatctgaaggcagttacatggatttacgtgaattttaacttttacagctccatatgaaattcttttctatatgcatttcttaaaatctgacatttttctttactcctccttgcaacagctatataatacgccttctgcaacaattctcttccgatctgtaaatcttccttttttcgttccccagtttctatctgtctgagaataatccatgctttatcacttaatacatcgctgatgatatttccaatatttttttctaaagcctccctcaggcattgttcacataatgttaaagcctctttatatcttttttgtttgttatatgtgaccgtcagatttctaagaattaacactttcatataatctgcatacgctccaaaaatataatccttttgcaagcattgtagcagtctctcaaaaatatacaccgcctcatccacatccccggcatgtgcataagcatttgcaaggctcatcagattcatgatttcctgttcggtaaacgggaaatcttttttcagacattcctcataatccggaagtgtcagccggactgcctcctgcaatttttcgattgttgtctgattgtcacttcttttgcagtaatagtccatcaatgcttctgactttaaaagatactgcctggtgatcacattatcatccgctttctctttcatcctgcctaaatataaatctgctttttcatagtcataattctgcattgcctgctcaaaaagttttcgttcctctaacagttctaagttcttcccaacacagatggcatagctcttttccggtacacgctccatttttgccatgagtcttgcatacagttctctttttacgcgagtctttccgctctcgatacgatacaatgtctgtaccgaacaaatctcattactcagttcttccctggacattccaacaaactctcttgtcatccgtattatatctccggctctgtagtttgacatactaatccctcaccatacttttctgcatcccgtgccttttcatcctgcccctccaactgatacagacacgcagcaatcttacattcttccatcgctttctttaacagcatatttttatccgcattttttggcgtgagcttttctctcgtttttgcccgcagaaaatagatgtctgcaagatgataaaaacccgctccctcactgatacattgaatcgctttttctgtgtaaaacataatttttctgtaatcattttttctctgttgtatggagatcagctctaaaaagatatccgtactgactttttcttttttgcccccggactgatacccactgacatacgctaaaatatttaataattcctgttctgccatctctgtcttcgacggatcatagtgtatgagcagcagtatcatcccgatctcaaccggactgtacagacgcaccttttccattgatttcctaaactcaggaattgtgagacagattcctttttctaaaatcccacacaaactgcttccagtattcttttctgcgatcatggtacgtgcttcctgataaagacaatattgttcatgtacagattcatcctgtggcatgactccccggtattctctaatcttctttttcgcagtttttacctgattgttttccacagatttttcaatctgctccctcattttccacaattcataatcttgttcacttaaaattgtttcaaacagagtgacttcttttccaatccttccaagcagtgtctgtccaagaagtgaatcgacctccctgctcccctgttccagtctcgacaaagtggtaacagaacagattcctctgcagatatcttcctgtctcaggtgatacttctccctgtaatattttaataccacttccatcatcttttgttccataacccacgctctttgcaccttcagatttttacgcttttcattgttcctttaatattccaaatctacaccagaacatctccctctctttttccctgccttcaaaccactcatctttgatctcagccctctggttcagcccgatcttttttaccgcctccaccgcagcctcacgctgtgacattttccggtttccggtagtcatgcagtttgcaccatctggcgtatcatatgccaaaaaagtctggttgagatccatcaggtcaaacaggcgtaccggctggtttgtgcggttgtccaccagaaatccccagtttccccagtggcggtccgtgttgccaatcaggtaatcgagcaggttcatcatgtagtaggaatatgcatccagctttaacacgaaatccataacgtgaatgtcatgatttgctgcatagatttcaaatgcctccattgataccatgctgtaatccaccgacgtaatgatcctgcttttggaaactttctgtccgtcaaacatactttcctcatagagcacctgtctgcagtcaaaacagcggcagatcttacttgcgaggatttcattttccacagccctgctgtttccatttttcaaaagggaaaacgaatttttttccctgatccacgcttttggaaacacgccgttggttgagagatcgtcagcaatcaggtaactgttctctacggtcatctgttttccgcgcagggaaatatccacaagtgcattatccagatgattttcaaaaagattgatctgtgaaaatgtgatattctcccctttttcccgaacccagaaaatatcagtcagtgacagacagtgataggacagcgctattttggcacggtcacggtcggtctgcgcctgcagtgctccgatactgtttaaaatttcctttgcatagacacggtcaagtgtcagaacacgggttgcgcaccagtaataaaaattggtgaggttatccatgcggatatcgagatcatcgttttctgctgtatcctccagataaatcgaaaagggcagaaacgccctgtccaaaactgtgcatactccgttcgtcccaatgtctgctactaccttttcgccatgcattagttcatacactgttttttccattcagcttctgccctttcttcactatacggttatctattcttcctcatcctcggaaccatcagcctctgcgcgctctaacagttctttcatcagctcgtcgtctgtctctgtattttctacagatgccttttttgcattttccgcagcgatggctgcactttccttttcttcctcctcactgagcagttcggatgtgtctgcattgtcgatcagactcttatcctcacgcacttttgcgatacttgccacagtgacattctcatctaagttgatgagtttgacaccggaagtaattcttccgagcaacgttgtatcactgactttgatacggataataattccttcggtggtgatcagcatcagttcattgtcctggtttaccgctttcacgccgacaatatttccagtcttttcggtgatcttgtaacattttacacccttaccgccacggttctgcgtggtaaattcggagatcagtgtacattttccaagacctttttctgaaacgatcatgagtgcatccccctgggactgcatctgcataccgataacttcatccccatccgtaagattcataccgatgactcccatggaagtacggcctgtttttcttacatctgtctctttaaaccggatacactgaccatatttcgtcactaagaaaacatcctgattgttatctgtcttttttacctcgatcagctcatcatcttcccttaaactgattgcagcaagtcctgtctttctgacatttgcatagtcggtgatcggtgtctttttcacaatacctttctttgtcgccatgaacaggaaatgtccttccgtgtattcacggatcgggataactgccgtaattttctcgcccggctggagctggagcaggtttacgattgcagttcccctcgcggtacggcttgcctccgggatctcgtaagccttgatacggtatacacgtccggtgtttgtgaagaacatcatgtagtgatgggatgtcgtcatcaaaagttcttcgatgtaatcgtcatcgatcgtctccattcccttgattcccttaccgccacggttctgtgcgcggaaattgtcaaggctcatgcgcttgatgtaacctaattttgtcatggtaatgacagtgtttgttaccggaatcagatcctccatggaaatgtcgtactcgtcaaagccaatggatgttcttctgtcgtcgccgtatttatcagcaatcagcagaatctccgtacggatcacgccgagcagttttttcttatctgccaaaatagcacgcaattctgcaatgcggtccatcagctctgcatactctgcctcaagtttttcgcgttccagacctgtcagtgcacgcagacgcatatctacaattgcctgtgactgtgcatcgcttaaggagaaacgctccatcaaacgtgattttgcttcctgcgtattctggctgctccttatgatgctgatgacttcatcgatattgtcaagtgcgatcagtaagccctctaaaatgtgggcgcgctcttccgctttgtttaattcgtatttggttcttctggtaacgacctcttcctgatgtatcaggtaatactttaacatgtcgtagaggtttaaaactttcggctcgttatttaccagtgctaacataatcacaccaaaagtatcctgaagctgtgtatgtttgtaaagtaaattcaatacgacattcggattgacatcacggcggagttcgatacagatacgcataccctgacggtcggactcgtcacgcagatctgtgattccatccacttttttatcgcggactaactcggcgatcttctcgatcagtctcgctttgttgaccatgtacggaagttcggttaccacgatacggtttttgccgttttgcattggttcgatatctgtaattgcacgcacacggacttttccacgtccggtacggtaagcctcattgatcccggctgttccaaggatcatgcctccggtaggaaagtccggacctttgacgatggaaagtaattcttcaatgtcggtatcgcggtcctcctcgactttgttgtcaatgatctttactacggcattgatgacttcgcgcaggttgtgcggcggaatatttgttgccataccaacggcaataccggtagttccgtttactaaaaggttcggataacgggatggcagaacggtaggttctttctccgtctcatcaaagtttggcacgaaatcaacggtgtcttttccgatatcggcaagcatttccatggaaattttactgagacgtgcctccgtatatcgcatggcagccgcgccatcgccgtccacggaaccaaagtttccatgaccgtcaactaacggatatctggtcgaccactcctgtgccatatttacaagtgcaccataaatagagctgtctccgtgcggatggtatttacccatcgtatcaccgacgatacgcgcacatttacgatgcggcttatccggaccattgttcagctctatcattgagtaaagcacacggcgctgtaccggttttaaaccatcccttacatccgggagcgcacgctgcgcgataacactcatggcataatcgatataggatgtttccatcgtttttttcaaatcgacgtcatgaatctgatcaaaaattttatcatccatctgatttcttctccatttctaactcgtctctgtcatccgaacttctgcaaacggatcacatcttctaaaaatccggctgcaccgatctgttaaatatccagattctgtacatactttgcattttcctcgataaactcacgtctcggttctaccttgtcacccatcaaagtcgtaaatgtcacatcaatctccgaagaattttcctcatcgatcatgacacgttttaaaatacgtttttccggatccatagtcgtctcccagagctgctcggcatccatctctccaagtcctttatatcgctggatcttgttattgccgtcacgtccgatctcaatcaggatattgtttaattcagcgtcatcgtacgcataccagatatttttatttttctcaatcttgtaaagcggcggagttgcaagatatacatgtccctgcttgatgagttccggcataaaacggtataaaaatgtcagcatcagtgtcgcaatatgtgcaccgtcgacatcggcatctgtcataataataatcttgtcataacgcagcctggaaatatcaaaatcttcgtgaattccggtaccaaatgcagtgatcatcgctttgatctcggcattgccgtaaattttatccagtctcgctttttccacgttcaggattttaccacgcagcggaaggattgcctgggttgcacggcttctcgctgtctttgcagaaccacccgcggaatctccctctacgataaagatctcacagtttttcggatctttgtccgaacagtctgcaagttttccaggtaaggaagtgccttccaaggctgtttttcttctggtcaggtcacgcgcttttctcgctgcctctctcgcgcgctgcgcaagcagagatttttcacagatactctttgcaactgcaggattctgctctaagaaatatgtgagctgctcacttaccacggaatccactgctccacgcgcctcgctgtttccgagtttctgttttgtctgtccctcaaactgcggctcctcaatcttgatactgatgatcgcagtcagtccctctcggatatcgtcacctgtcagtgctggttccgaatcttttaaaatcttatttgctctcgcgtaagtattaaatgttttcgtcagcgcattacggaatccggcgaggtgcgtaccaccttccggcgtaatgatgttatttacaaaactgtaggtcgcatcgttgtaggaatcattgtgctgcatggcaacttcgacatacacaccatccctgtttccctcgcagtaaatgacatccgggtacaatgcctccttgctgcggtttaagtaagtgacaaattccttgataccaccggcataatggaactcatgacaatgatgcgattcttctctggtatccgtaagtacaatgcgaagtccttttgttaaaaatgctgtttcacgaagacgctgttttaaagtgtcgtaatcataaacggtctcctcgaaaatctcaggatccggatggaatgtaaccttcgtgccgtgtttttccgaatcacaggttccgattactttgaccggttcgtccggttttccgatatggtaactttggaaataaacctgtccctctttgtatacttcaacacaaagtttggtggaaagcgcatttacaactgacgcacctactccgtgcaggccaccggatactttatatcctccaccgccgaattttccgcctgcatgaagaaccgtatatacaacctcaagtgctgattttccagctttatgattcattccaaccggaataccacgcccgtcatcttcaactgtaatggaattgtccgggttgatggtaacctctatgtttttgcaatatccggcaagtgcctcatccacggcattatctacaatctcatagaccaaatgatggagtcctctcgccgatgtactgccgatatacatacctggtcttttacgaactgcttcaagtccttccagaatctggatctggtcagctccgtattcatttggattttcaattttttctgttgccattctgctaaccttgcctttctataacttgacctttttcaaatacctgaccacttattacctcaaaaaccttattgatttcgaacctgttacggataaattcatccaaaccggtacaggtaataattgtctgggtatcacatatactgtttaacaaataattctgacgattgctgtccaattctgataaaacatcatccagtaaaagtaccggagtatcatgaattgattttctcaccagctctatctcggataacttcaaagagagtgcagaggttctctgctgcccctgtgaaccaaatttacggatatcaacacctgcaatggaaaaaagcagatcatcacggtgtggccctacggatgtctggcactgtttcaggtcgcgcggtttcacccgttctaactcctgttccaacagatccgcagaaacactaggctcatacgaaagaaaaagttcttctctcccacctgatatccggtagtgtatttcatgaacaatttcatttagttcttttacaaactgttccctgcgcctgatgatttttttcccggtatcagccagctgcatatcccataccgggagtgtatccgataattcaggccggtaaaccatatctttcaacagtttattgcgctgatttaagattttattgtaatttgacaggtcagataaataaattttatctagctgacataactctgcatccagaaaatgtctgcgttcggagggaccgtttttgataatattcaaatcttccggcgaaaaaaatacaatgtttaaaattccaaaaagctcacttgcttttttcatcggtatcttatttacggcaattcccttagaacggttatgttttaaatgcatgtcgatctggtattgtttgccgttttttaaaaccatggtacgaagatgcgcttcgtttgttccaaaacggatcatctctttgtctttgcttcccttgtgggactttgtagttccacttaagtaagcagcttccaggatattggtctttccctgtgcattatcgccaaataaaatattggttccctcatcaaatgaaatctggagattttcatagttgcggaaattgttcaattcaatggactgaatgatcattttgagactttcaccgtttccccgttataggaaatcaaatcaccatcatggattttttttccacgctgaagttctgtttcaccattgacttttaccagaccatcctggatgacaaattttgcatcaacaccggattccacaagtccggcttttttcaaagcctgtccaagttttataaattcatctgtttctctaatctgaatctctatcatggaattcctttctatcgccctttgggcaatatcaatcatagatttcaaattctataaaaataattagtttgcagctgcattaaagttaaccggaagaatcagataaataaatgtaccttcatcatccttgataaaacatggtgctttcggattgaccatgtaaagtgttacttcttcttcatcgattactcgcagcgcatcaatgaaaaactttggattaaagccaattaaaatatcttttccttctttggcaatatcgatatcttcattcatggaaccaataaaggaattgatttttaattccatcgttccatctgtgatgttcatgatgatcggtttcttatcaccttctttgacaagaagtgttgcacggtcaatacagtctaacagctcacgtttgtttatttttacttttgtttcgtaatcagaagataacatctgttcaatcttgaagtattcaccttcgatcagacgggaaacgactgtcgtattttcaaactcaaaaacgatgtgattgtctgtcaggaaaatagatacttcatcttctgcactacccggaaggattttgctgacttcctgaagtgtttttccgggaacgacaacttttttgtgagaataattattttttaattcaatgttgcgaatcgaaatacggtgtccgtcgagggagacaaccttaagatcgttttcttcgatctcgaacaactcacctgtcattaatttgttgttgtcattgtcagcgatggagaaaatagtctggcgaatgacttcttttaaggtgaactgggacataacgattggttcgttacgttcaatgtacggaatataggaaaaatcatcaccggatttaccgacaatgttaaattttgctttttcacatgtaatagttgttttaaaggatgcgtcagtttcgatcgtaacatcactgtctggaagtttacggacaatctcggaaaagatttttgcatccagtgcgattacaccacgttctgcaatctcgccttcgatctttgtttcgatcccaagttccatatcatttgcagtaagtttaatttcgtttgcagaagcatcaatcagaatacattctaagattgccatggtagttctggttggaactgcttttgaaacaatattaacaccatgtaacagattagatttagaacaaattaatttcatgttgtagataactccttcctgatgaaacgtagtggctcgccaaaacgtgttcataaaaaaataaatagaaatccgccgtagtcgtcttagaggctgttaataagttgataaccgcagaaagccttaattttcaaggggttaaaaaaaatttgaggtggtataaccctgtgaaaaccatgcggaaattatcttgaaatgatgtgaattgaggatgaggctcataaatgccttaaacaggttttaaacatgaaaatgagacttgtccatacggaattcacgttaatttaacaagatatcaacaattttttgtgtataacttcgaaaaaccttgataactttagttaggattgatttttttcttgatagtttctattaaattgcgtgtattttcgtttgattcgtattcatcggcaatttttttgataccatgaataatggtggaatggtctcttcccccaagtaactgtccgatcgagtcaagcggtatatctgtcatattcttacagaggtacattgcaatctgtcttggtctggcaatttcgttacttctgttttttgagatcatctgatccagcgaaatattgaaatgttcggtgacaacttcaattacaagctgtggcgtgatctctcttggcttgtccggtgtaataatattctgaagttctttcatggcaatttccattgtgatatctgttttttcaagattggaatatgccagaagtttgtttaaagctccttcaagttcacgaatgttggatttaatgttagttgcaatataattaagaatctcatcgctgagtttcatgtcgtctgcttcaacttttcttcgcaggatagccattcgtgtttcgtagtctggagttccgatatcagcaataagaccccattcgaaacgtgaacgaatccggtcttctaaggtttccatgtcttttggcggtttatcggatgttaaaataatctgcttgccggcagagtggagtgcattaaatgtatggaaaaattcttcctgtgtactttccttaccgatgataaactgaacgtcatcgaccattaatacatcaatcgtacgatacttttcacgaagtttgttcatagcggaagcattaccacttcgaatcgactcgattacttcgttggtaaattcttcggatgtaacataaagtacttttgcgtttgggtttctctctaatataaaatgaccgatggaatgcataaggtgagtttttccaagtcccggtcctccataaatatagagaggattgtatgcttcacccggagattcagcaacggcaagtgacgccgactgtgcaaaacggttattgctgccgacgacgaacgtgtcgaatgtatagttcggattcagatttgatctgtccgccttttcggaaagtgcattttttttcggtacgccgctattgccggtgcggatattttttgtctgttccggcaggatgaacttgatttcgtattctgtccccgtaagttctgcaatcgttacctttaaaggaagataatatttttttgaaatatagcttagggtcatctgttccgatggaaccagtatatataaagtgctgccctcgacgccgtaaacttcgagcgggcgaatccaggtatcaaaagaaatatcactgatatcatgctcatgtttgacggttgagagaatctcgtcccatttttctaaaattttatccattttaatcctcatttttgcgctgtattttgcgcataacaaatatgagcttacgcccaaatttgtacgctcctgataaaaaatcctacatagttctatcctacactatttttttgcttttatcaatgaaaagtttgtacagggtattttaagttagggtgaatgcaaaaaaaccccaatttgggcaaaatagaaagcctgaataataaaaatttgcatgaagggaaaaaatatgtgtgaataagtcgaaaaaagttatagaccgctaaatataagggattatcctgtttataaacagattatccgtggattatccataaaatatccacaagttatccacaaattggggataactttgcgaaaccgctaaaaatcggcattcttcaacccacattttttaacattttcgggggataactgtggaaaagcaaataacaagatataggatgatagagtttcttccttatatatatagtggtcaacattttccacaaatggataaatgttgaaatgtagataagtaaaatgaggtcaaacaaaattttagtgcttgacttgaaacatttttctgctataattgagaatgatgttttttaactgagaatatgcgtcttaggacgttttctatcgcatcgtcatttcaggatgatggtgaatgccaggcagaggaggtggatataacatgaagatgacatttcagccgaagaaaagacagagatcaaaagttcatggcttcagaagcagaatgagcacagcaggcggaagaaaagtattggctgctagaagattaaaaggaagaaagaaattatcagcataggccacatttttgtggtcttttctttccttaagaagaatggatgaataatgaggtggtgcattttgtaccacctatttgttcattcaaagatattttatgggtaaagtaagcagagaccttcaaacagacagaaggtagttggtgccttaggtaaataatcagaaagggcatactaggatgaagttttcggaatcattaaaaaagaacagtgatttccagaaagtgtacaggcagggaaaatcctatgcgaaccgttatctggtaatgtatgttctggaaaatcatacagaaggaaatcgtcttggcatatccgtcagtaaaaaagttggaaacagtgttatcagacatcatctgacccggctgatccgggagagttacagactacatgaagacatgttcaataatggtttggacattgtagtcatcgcaagaagtacggcgcgcaatatcagttatcatgaaacagagagtgctctgctgcatcttggaggtcttcacaaagtaatcaatcgttaattgcagaaaaaagaagatggaatcattttgaaaaaaatattaattgctttaattaagttttatagaaaatatctttctccgatgaaaacgaccaagtgtccatattgcccgacctgttctttatatgggttggaggcagttgaaaagtacggagctctaaaagggggagcacttgctttatggagaatcttaagatgtaatcctttttcaaaaggtggatatgatccagttccatagtggaggtatttacaagtgtcagatacgttattaacagcatacaatggtgctattttaggaccgatcgccaaagtacttggctgggtaatgaatggtatttatgcgttgatgtcaatgatcggtattgagaatgttggtctttccatcattatctttactatcgtgatctacgctattttgttcccgttaacttacaaacagcagaaattttcaaagttatcacagaagatgcagcctgaacttcaggcgatccagaaaaaatataatggaaaaaaagatcaggcatccatgatggcaatgcaggaagaaacacaggcagtatatgaaaaatacggtgtttccatgatgggaagctgtgtgcagatgctgatccagatgccattgttgtttgctctttaccgtgtatttttaaatgttccggcatatgtatccggtgtaaagaacaatttctctacgctggttgatggaattatggcaacaagcggttatcaggataagatgactcagctcgttacagatttaagagttatgacaacaccggcagcagattttacagtgtcagatccgactgctctttcgaactctattgttgatgttttatacaaaatgaattcagcaggatgggaaaacttaaagagtgcatttccttctttgacggataccatcaatgcgacttatgatacagtttcacatgtaaacaactttctgggactgaatatttcagatacaccatggcaggtcatgacgacgaactttgcgtcacataacttcctgtttgtagtattagcacttcttgtaccggttatttcttatctgacccaggtacttaacattaagctgatgccgcaggctgctccgtctaacggaaatagcgataatgatatggctgcacagcagatgaaaatgatgaaccgcactatgccgatcttttcatttgtaatgtgttttaccgttcctgtaggtcttggtatttactggattgccggtgccgtagtacgaagcgttcagcagtttttcttaaataaacattttgagaaaatcaatcttgaggatattattaagaagaatcaggaaaaggcaaagaagaaacgtgaaaaaatgggaatcgctgaaaatcagatttccaatgctgctaagatcaatacaagaaaaattgatgaaccgaaaaaagaagagaagaagtctaacatgagtgagacacagcgcgagcttgaattagagaaagcaaatgccgcaaaatcaaaggcaaaagccggaagtatggccgcaaaagcaaacatggtccgcgattttaatgagaaaaacagcagaaaataataagaaaggataggggtttggaatggaatatattgaaatttcagcaaaaacagtcgatgaagcaatcacagaagcactggtaaaactggggacaaccagtgacagaatcgaatatgagatcgtcgaaaaaggaaataacggtttccttggcatcggaagaaaagatgcggtgatcaaagtacgtaagaaatattctgtgaatgatgatatcaaggatttcttaaataaagtatttgaagcgatggacttaaaggttgagatcgttatgactgcagaagaaaacagtaatgtgatcaatgttgatttaaaaggtgatgacatgggcgttttgatcggaaaaagaggacagaccttagattcccttcagtacctgacaaaccttgctgttaataaaaatgcagaaagttttgtaaaagtaaaaatcgataccgaagattatcgtaagagaagaagagaaacattagagaatcttgcaaagaatattgcatacaaggtaaagagaacaaaacgtccggtttctttagagccgatgaatccttatgaaagaagagtgattcattctaccttgcagaatgacaaattcgtaacaacacacagtgaaggagacgaaccttatcgtcatgttgttgtaacattaaagagacagtaaaccggttttcatccgtgtgtgatgaatgacacagaaaaattcgtggcggataaagaaaacgtccacgaatttttttgtatatggaaatgaggtattatgcgaacagatacgattgctgcgattgcaacagctatgtcaagttcaggaattggtataataagaatcagtggagatgaggcagtcgggattgtcgaccgtattttttcaatgaaaaacggaaaaaaattatctgatatgccgacacatacgattcattatggtcatatcaaagatggggatgaagtgatcgatgaagttatggttgtactgatgcgggcaccaaaaagttacaccaaagaggataccgtggaaattgactgtcacggtggtgtgtatgtcatgaaacgggtgcttgagacagtaatcaaatatggtgcgcgtccggcagagccgggagagtttacaaaacgggcatttttaaatggacggatcgatcttgcacaggcagagtctgtcatagatattattcatgcgaaaaatgaatttgcattaaagagttcagaacgacagctttccggttcactttcggctgcagtaaggaaagtccgtgaaaaattgctgcatgagatcgcatttattgagtctgcattagatgacccggagcacatcagtttagatggatatccggaaacacttcatggaattgtggaagaagcgcagaaagagattcaaaagcttcttgcaaacagtgacaatggaaaaattttaaaagagggtatttctaccgtcattattggaaaaccgaatgccggaaaatcatctcttttaaatacgctcgtgggagaggagcgtgctatcgttacagatattgctggtaccacgagggatgtactggaagaacagatcaacttaaatggaatcattttaaatgtgatcgatacagcgggaatccgtgagacggacgatgttgtggaaaagatcggcgtggatcgtgcaaaaaaatatttaaatgaggcagatctggcaatttatgttgtggatacatcgacacagttggatgaaaatgattttgaaatcatggaactcttaaaggacagaaaagcgattgttcttttgaataagtcagatcttacaccggttaccgacagcgaatcgatcaggaaacatctggataaaaaaatgattgcaatctctgccaaagaacagactggcattgaggaacttgaggagacaatccgtgagatgtttttcactggagaggttacatttaatgatgaggtgtatatcacgaacattcgccataaaaccgctttacaggaagcacggaatagtttaaatttagtggtgcagagtatcttagacggaatgccggaagatttttattccattgatctgatgaatgcgtatgaagaactgggaagtatcgttggtgaggcagtcgaagatgatctggtgaatgagatatttagtaaattctgtatgggaaaataattggcagaaaaaatatatggtttaagtattttagaaagaaggataaaagatgcctgcgattgaagaaaattatgatgtggtagttgtgggtgctgggcacgcaggatgtgaggcggcactggcatgtgcaaggcttggactggaaacaattatttttacggtcagcgtggacagtattgcgatgatgccttgtaatccgaatattggaggaagttcaaaaggccatcttgtaagagaaatcgatgcactcggcggacagatgggtatcaacattgacaagacgtttatacagtcgaagatgttaaataagtccaaggggccggcggtacattctctgcgtgcacaggcagataaagtgaattacagcatggaaatgcggaaaacgcttcagaacacagagcatcttacaatccggcaggcggaagtggcggagatcattacagttccggcaaattctgctgatggagaaacagctgctgtagaaaaaaaagatggacagatggttgagattaatggtgagcttcagaaaattaccggggtaaagactgtttccggtggagtttatcattgtaaggcagttgtgctctgtacgggaacttatttgagagcgcgttgtctgaccggagagatgattacttataccggaccgaatggtctgatggcagcaaatcatctcacggattccttgaaagcacatggaatcgagatgttccgttttaagacgggaacacctgcgagagtggataagcgttctctggatttttcaaaaatgcaggagcaaaaaggggatgagagggtagttccgttttcttttacgacaaatccggaggatgtgcagattgatcaggtttcctgctggctgacgtatacgaatccaaagacgcatgagatcatccgtgcaaatctggatcgttccccgatttatgctggaattattgagggaaccggtccgcgttactgcccgtcgattgaggataaagtggtaaaatttgcagacaaagaccgtcatcagatttttattgagccggaaggaatcaataccaatgagatgtatgtcggtggtatgtcatcttctctgccggaggatgtgcagcatgagatgtaccgtacattgcctggaatggagcatgtaaaaatcgtgcgaaatgcatatgcaattgagtatgactgcattaacccaaaccagctttatgcatcattggaatttaaaaagattaaaggacttttttccggtggacagtttaacggaagcagcggctatgaggaagcagcatgccagggactgattgcaggtatcaatgcggctatgagcattttaggaaaagaaccactggttttagaccgctcggaggcttatattggagtgctgattgatgatcttgtgaccaaagaaaatcatgagccataccggatgatgacttcgcgtgcggagtatcgtctgctgttgagacaggataatgcagatctgcgcctgacgaaaaaaggttatgaaattggcctgatttcaaaagagcgttatgactgggtatgtaaaaaggaagaactgattgcacaggaaatcgagcgagtggcgaaagtaaagatcggcgcaaataaaaaagtacaggaattactggaaagttacgatagtattcctctgaacaccggaacatttttaacagaactgatccgcagaccggaactggattatgataaacttgcaccgattgatccggagcgaccggatcttccggcagaagttgccgagcaggtaaacatcagcatcaaatatgatggctacattaagcgtcagatgaaacaggtcgagagttttaaaaaactggaaaagaaaaagattccggaaaactttaactatgatgatgtaccgagtctgcgtattgaggcacgtcagaaattaaagacctattcaccgacttccatcggacaggcatcccgtatttcgggagtatcaccggcggatgtgtcagtgttacttgtgtatatggagcagatgaaatatcatgagaaagagtcggcagaatgatagaaagacgaaacatatctgtaacggcaatggtattttataaaagaaaaaagtatatcgagatatgagtgttggatatgcatactaagagagaatggagatcagaatgagttataatctggaacagtttaaagatggattaaaagaacttcagatcgagttgaacgagaaacagatcagtcagttccttaagtactatgaacttctggtagaaacgaataaggtaatgaatctgaccgccatcacggaatttgatgaggtggtagaaaaacattttttagacagtctttctttgtgccgtgtatatgatctaaaaattgatgctaaaattttagatcttggaaccggggcaggatttccgggaatcccacttaagattgcatttccaaatttagagttagtgcttgccgattccttaaacaaaaggattaagtttttaaaccaggtgattgatgaactggaactgaaagatattactgccgttcatgcaagagcagaagaactgggaagaaataaagattacagagaacagtttgatgtatgcgtttctcgcgcggttgcaaatctttcttcactcagtgaatactgcatcccatttgtgaaggttggaggaaaatttatttcctataagtctggcagtattgaggaagaagtagcagaggcaaaaaaagctgttttcgttctgggtggaaaagtgacggatgtgtataaatttgatctgtatgagcagaaacgatcttttgttgtgatcgataaggaaaaacatacaccgaaagcatatccgaggaaagccggcactccgacaaaggagccgttacactaaaataataagggtaaaagaaagacattttataaaaaaataaagtgtcataaatagaaaaacattttgtaagaaaataaagtgtcataaatagaaaaacactctgcgtgaaagcatcgtgttattgatcaaaaaagtgactgtgaaaaattccgacagtcacttttttgtatattcatgtattatttttcttcacgttcgaaaagcatacgaatcacttctgccaatttatccggtgcctctaactgaggaagatgttttacattggaaatataggcagtttcaatcatggaactttgctttgcatagcttgttacgatctgaacggaatccggattacttctgctttccacaacatagaaaggaatggaaagtttcttgagtgcatgtaaaatacagttatccatgtactggccttcaatgcttgccattaaatattttccgtggctgccattcatgtgggaagcttcgtagtaagcatctaacattttagaagaggcaagctgcggtttgttaaaatattctgtataaaataatttctggatatttttttcatgtgtttttacattgtaaataaatgttccaagaataggaacttccagtaatgccttctttaaagtagaagagttactcggtgtgcggttgaatttttccggcattggcggattgattgcaatgatcttatggaacagatgattattcatgttttctgccaacgttacaaaggaaatagaagaaccggttgcaattacagtcggggcatctttgataacttcttttacaaaatctgtaataagctgaacatataaatagttggtgtaggtcagataaggtttctcggaacgtccacagcctaagaggtcgatcgtatataccgtatgctgtttttcaagtttctttgcataacggcaccactcataagaagaactgagtggactaagatcatgtattaataaaacaggtgtcccggaaccacgtcttgtgtaatatattttgccattcttccaatcaaaaaaattaccattttccgtctttaatatatttttcattgaagctgtaaaatcaatgaaacgatttactaaatggatggttccggcggcaaatgcagttaacagaaaaaagtgtctgatgttttttttcatacttttattcataaatgcctccatatctgccaaataacaggcgtttttttataataatattatagccgcttttgtcttcttatacaaataaattttatattttatcttttcaataatgtaaatttagtataaaataaaaatggtctattatttatgtaatataaaacgtatgttcgaaggaagtatatgataagtgagtatttaaaaaaatttcagtcggagctgatgtcgaataaagaagagattcataagtcagtcgaggcactggaattgcagattaaggaaaataaggcatttataaagcttttaaaagaggaaaatgattcaaattatgaatcatttagtccaagggatgttaatccgaagggcagagaacagatccagcatttagaagatcagcagaagcttttacaggaacagttagataccagaaaaaaagaatatgtatcctgcattgcaaagttggacgaattaaatgaggcaatcgctgaattagaacagaagataaatgatagtgattcagatatcagtgatgatatattgcgtctcaagttattggagacgcaggaaaatgagaggcagcgtatatcaagggaattgcatgattcaaccgtgcagaatctgacgagtctggttcataaaactgaattatgcagtaagttgattgatatggataaagtccggtgtaaactggaattaaatatcatgtctaagacgctgcgggacattatcaatgatacacggaacatgatttataatttgcgaccgatgtcatttgatgatattggcctggaagttaccattgaacgtgcattagagaagttagagagcagtgaaacaaaaaagataaatttttctgtagtcggtgagtcatataaaattaatcctgttattggaattacattgttaaggattatacaggaggcatgcagcaacgcaatccgccatgcagattgttccataataaaagttgtattaaattatcaaccgggaacaatcatactttctattgaggatgatggaaagggatttgcatatgaagaaacggagtgtagttgtaaagccgataattcaggatttggtttatctatgatgaaagaaagggtataccttttatctggaaaaatagacattcattcgaaaataaatgtggggacgaaaatccaggttgaagttccgattaccgaatagggaggtacataaaagatggcagtaaaagttatgatagcagatgatcattcaatgattcgtgaaggtttaaaacaattactggagttagaaggtgattttgaagttattgctgaagcatgtgacggagtagactgtcttgaaaaattaaaaacagttgtaccagatattttattactggatattaatatgccaaatatgaatggactggaagtccttcagaaaatgaaagatatgaaaatgaaagtcaaggtgttggtattaacggtacacaatgaagtagagtatcttttaaaggctgttgatattggagtaaatggatatttgttaaaagattctgagtctgcagaattgaaaaaagcaattttagcagttgtaaatggagaagattatattcagccaagtttaataccagttttaaactccaagatgcttgaccgggatagtgatagcagtaagattgaaagtcttaccagaagagaactggaagttttaaagatgctttcttatggaacttataataaagaaattgcagagcatttgaatatcagcgaacgtactgtgaagaatcatgtttctaatatctttaaaaaaatcggagtaacagatcgtacacaggcagcagtatttgcgattcgcaataacctgattaccatctaagaaattgattataaattaacgtaatgatttgaagtgtcgttacaatgtttcacgtgaaacattgtaacgacacttttttgattcatgataatagaatgtttgcagagcgtgcattctattattgaaaaatatacaaagaattgtatattttattccattgtcttaaaataagaaaattgatagcaatgcaattaaatctaataaatattaagattgttatgatcttcctgatgcagattatcttgaagtaatgtgaagagcaataatgattaagctttgactcgatgtttatttgtgatttaattcataaaaaaatatcactgtaaataaacgggtaaactagaatttgctaattttctatcaaagttaaacgatgaatgtggaatttgtacctcacaaaaaaattactgtaaatagcactgaatcaggctgattgacagactgacaaaattggcacaggcagctttttattttatgtcttttttatcaaaaatattcttatttataataatagatatgtttatggaatgtggtgtaatgtgtcatctaaaataggagatttacctgcaaggtatagaatctattgattataaaattctattctgtaaataaaaaaaccggtagttaaaagatgaacgaaaaataatgattttgtgctgagcagattagaacagagatagagtataaaatgataaattattatatcggggtacattattacaaaatataatattataaaaatacggaaaatataaaatgactacaaagtaaaaacaagtaagtatatattggagaggtataaatggcttaaaataagaaacagtatttaatcaataaagtttaagattatggtatattttgcatattatgcaaattagaatacgatatttttcatcgtgcataatattatgattttactggaaagcaatatgcaccaaaatagtaaaattaatattatataactgtaaaatatcaaagtgattcatagttattaataaaatactgaaaatatagaaatatgatatggtggaaaaaatatacgcaagatttgtgcctacgcataaaattaagatgcaagtaaaaatattgtgtttattgaaagcagcgtgagagtgaagcttaatatgtaaccaattaaaataagtataaaattgaatatgcaatgtttcacgtgaaacattgcatattcaattttgtcagtgtttatatggtgaaaattattgtacgataatatttagaagagtaaataaaaatgaaattatagcacgttaatatttcaatagagtaaataaaaatgaaattatagcacgttaatattttaatagagtatacataaataaaataattacacaataattacacaataatatctaatagagttatatataaataaaataattacacaatagtattctgataaagtattccacccaatattataaaaggtaaaatatattttagttgttaaatacgaaatcaatacacagatgtttcacgtgaaacattatttgttggatattttatctgtcatataaaagtatagaagatttcatgttgagtaagctatgcatcaaacaaagaatctccagaaacaataaaaaatatataattattcaaatgtgaaataaatattagaagtaaaaatacacaaaatgtttcacgtgaaacatttttttatagaaatgcatatatataagtgctataatgaaaccaataaagaaggaaatgaggattataatgagcagaattatagcaatcgccaatcaaaagggcggtgtaggtaagacaacaacggcgattaaccttgcttcctgcttagctgaagcaggaaaaaaagttttaacaattgatcttgatccgcagggaaatatgacaagcggattaggtgtaaataaaaatgaactggaaaacacggtatatgaattaatgcttgatgaatgttctatcaaggaaagtatggttgatactgtagtggatggaatgaagattataccgtccaatgtgaatcttgcgggggcggagattgaattgttaggcattgaagataaagaatacattttgaaaaatgctgtagattacgttcgtgatgattatgattttatcattattgattgtccaccatcattgaatatgttaacaattaatgctatgaccacagcagattctgtacttgttccaatccagtgtgaatattatgctttggaaggactcagtcagttgatacataccattgatcttgttcagcagagattaaatccggaacttcacattgatggtattgtgtttactatgtatgatgtaagaacaaatttgtcaaatcaggttgtagaaaacgtaagaacaaatcttgataccaaaatttatgatacattaatacctagaaatatccgtcttgcagaggcaccgtcacacggactgcctatcaatatgtatgatacaaagtcagcaggagcggaaagctatcgcatgttagcaaaagaagttatggaaaggaagaatgtataaaagtatggcaacaaaaaaacgtggtctgggacagggaattgattcattgattccaaataaagtaaatgcaaataaagaaactgagacggtaaaagtaaatgctggttctgaaaaaaatgagacagatggaatctttgttaatatcaataaagtggaaccaaacagagaacagcctagaaaaaactttgatgaggattcattggtggatttatcagaatccattaagcaggtgggagtgcttcagccgttacttgtattggataaaaaggattattatgaaattattgctggggaacgacgttggagagccgcaaaacttgcgggattaaaagaagttccggtccggatcatgaatcttaccgatcaggaagttgtagaaatttcattagtagaaaatatacagagagaaaacttaaatccaatcgaggaagcgtttgcatataaaagacttttaacagagttccatttaaaacaggatgaggttgcggagcgtgtttctaagagcagaaccgctgtaacaaattctatgaggctcttaaaattagatgaacgtgttcagcagatggtaatcgatgatatgatcacaaccggccatgcaagagcactgcttggaattgaggatgtggagaaacaatttgcaactgcacagaaaatttttgatgaaaatttaagcgtgcgtgagacagaaaaactggtaaagaaaattcaaaacaataaagatattccagtagaaaagaaaaaggtttcagatcctgcaatggaggcaatttatcatgatttagaggagaagatgaaatcaattcttggaacaaaagttgctatcaacaaaaaagatgatcaaaaaggaaaaatagaaatagaatattattctatggatgaactggatcgtattattgatctgatccgcacaattgcataaaatatacatatacagaacatttgttctaaaaagtgaaaggtaaaataatgatatcaaaatatttagggtttgactcagattatattattatagggctttgtggagttcttttgattttatttatattaacaattgtaaatattgttcagatgaaaaaattaaaaaagaattaccgcatttttatgagtggaaaagatgcaaagacactggaagatacattgattcaaaggttagatcaggttgattccctgttagaatcaaatgaagaaaatgacagcaatattaaagtactctctaaaaatatgcagcgtacctatcagaagatgggattgatcaagtatgatgcatttcatgagatgggaggaaaattaagtttttctcttgcaatgttagatatgcgcaataatggatttattattaatgcaatgcacaccagagagggctgctatacatatattaaagaaattattgatggtaattctgtaattgttttatcagaggaagaacaggaagctttaaaacgtgcaatggatccgaatagtaatttgaaaaattcggatgaggaatagtgtgagaaataaagttatggagaaataatgagaatacggcaggtcaaatcacttgtaggcggagaaacactggtggaaccggttataacaaaagaaaaagaaatattgatttccggtggaacagtgttaaaaccggagtatttggatcttatttcttttttgggtatcgataccgtatgtattgaagatccgtatgaagcctttgaaacaacacattttattatcagtgaagagagaaaacaatattatgtcagtgaagttcaaaaaatcctggaaaatcatatttaccatggaaaaaattcattgaacaaaatgacggaccttgcaaatgaaattgtcagggaaataacggaagaagaacagccaaaagtcatagatatagaagaacgcaatggaagtctttatgagcataccgtccttgtgaccatgttgtctttggtggttgcaaaaatgttaaaagtaaaagaagaatcttatattgatattgcaacaggggcacttttgcatgatcttggtatgcgttacatcacggttccatatattaattttgatatggataacagaccggcatcggaagtatttgaattgaaaaaacatacaatactggcatattcagcgttggaaggtgaggactggatatcgcctgtttcaaaaaagatggtattatcgcatcacgaaagaaaagacggttccggttatcctttaaaacaaaaaacaaaagatatcgagtgtaatatattgcaggtatgtgatacatttgattgtatgatttccggaatggaatgcaaaagaatcagtgtacagcaggcacttgagacaatgatagaggcagcagatcttttatttgaacgaaaaatcgtaaaagtattacagaaaatagttgcatattatccggtcggtacgaaaatccggctgaatacaggagaaacaggaatcgttgtatgccagacggacaattctatccgtccggtcgttgctgtcttagatcaggataatcagatgacggaaatcagatatgacctggcaaaaaataaaaaaatatcaattctgcagttggtttaagaatggagattagtgtgaaaaataagttttttcacacgcaagatttgtgcttacgcacaaacttgagatgcgcaaaaaacagcgcaagaatggagattaatatgcataaatttttaagagcagtcggtctttcggatattaagaaagaagaactcgaaaaaatatgtaaagatatagaagaaaaaccggacacaattaaggtggcagaggattcggaaggaaatgaatttgctgaactttgtcatcagtttggcgacttttttggtctgacgctaagaggtacgtaccgggaagatgacacatttgagatggattattactatccgtatttttttggcacaatgttatccacaagagaacaggcagaagtggaaaaacatgcggaaaaagagtcctatgcggggatatgtgatgaagtcagaataggagtgacgttaattttctatctgcagaatgttgtggattttctggctgtaaaaggatcaaaaaaatatatgaatctggaggaaggtgttattttaggtgcgctttctacagaaggaaaaattttgcttccaattaataaaactgagaaaaaaaataagcagaaccagcagaatacaacggaccgcaattatctggtagcagccgcaagagatggggatgaaaatgcgatcgaaaatctgacgttagaagatattgatacatattccatgttgtcaagacgtattacgcatgaggatgtactcagcattgtggattcttattttatgccatatggcattgagagtgatcagtatgcaattctgggcgaaatattagattgcaggctggaacagaataatcttaccggagaaaatgtctgggtgtttgatatctgctgtaatgaaatgaactttggagtctgcattaatcagaaggatctggttggagaaccacaggttggcagacgttttaagggcattgtgtggatgcagggaagtataaaatatagagaataagtgtagatattttccaatgtcattaacttaaaagcagaagatatttattcctaaaaggataagatatcttctgctttttgctaaagttaatgacattgactatttataaccttctgaagaaaaaggaattccggtggatccagttggatggcggaaagtatcgcatctcaaagaagagtttcgatgactggctcgataacttggaacagtaaaaaaacagagtgttgatcaggcagattttgtctgcatcgacatcctaaatttttatctggatttgagatatgatataagaaaaaacactaacactaaaaagacaggaagtgaagaataaatggcaacagcaattatgaaacaaaaagaagttccagaaatggacgatgttgaaaaagtcatttcgaagatttcagaagaaagttcttacaaacggcgtccaacacaaaagagaacctggatgacagtgccggaaagatacgaatcaatattgtcagctttgaaaaatggtacgccaatcagattaaatatcataaagttaccggagaagaaccagggaaaaaattgaaatcctgctgatgaagtaataaattctatatccaaatgagtatctttattgtgcatatggagaatctatctccatcaaatctattgaaatctccatcatttagcattaaaatgatggagataaattcaaaatgaaggagatttcaatgagaaattttgattatattacaaatcctgcgaagttgctgacacctgaaattgttcagatggttggcagtattcatgagcataaaggtaaacaggaattatttctggaagcaaacatagatgaactgaaaacacttctggaaattactttaattcaaagtacgggagcatctaaccgaattgaaggtatatttacaagtgataaacgtttggaagaactggtaagtcagaaagcagagccacgtaatcggtctgaacaggaaattgccggttatcgtgaagtgctggctacgattcacgaaagttatgaatatatcactccaaaaccaaacattattttacagttacatcgtgatttatattcttattcccaaggaaacatcggtggtacctataagaattcagacaatgtaattgcagaaaccgatgccgggggataccaaaaagctcgttttattccagttccagcttttcagactgcagaagcaatagacgaactttgcgctcgtttccttgaagcatgggaagcaaatctcattgataaactgattttaatccccatgttcattctggattttctgtgtattcatccttttaatgatggaaatggtagaatgagccgtctgttgactttattgttgttctataaggctggatatatcgttggaaagtatgtcagcatggaaatgctgattgaaaaaacgaaaaaaacatattatgaagctcttcaagcaagttctgtcggttggcatgagggtgaaaacagttatgagccttttgttaagtattatttaggtattatgctaaaagcatacaatgaatttgaaagccgtgtagaacatttgaagtaccataatctttccaagccggatagaattaaggcagtgattgataataaggtcggtaagataacgaagaaggaaattatggaactatgccctgacataagtaaggttaccgtggaaagaacactgacggatttagttaagagtgggtatatcgcaaaggtcggtgcaggtccatccaccggttatgtccatatttgaaaaattattttcagatttccataataatattattattactttgaattaaccaatttaccagtcaaaaacgcatggacaaaccgtctcgtatgcgttatattatttatagacaagaaaatatcttgtgctttcgataggaagtttaattgaatactgtttaccatgatcgaacgtacgaagcatggtggtcatataacagatgtcgatggtaatatcaaggcattccccaattattagctggagcaaacaatcagctaactttcagagcttgacagagggggtattcagaataactcaaattgaatcggaaatagtttttaatagtgtcccatatgggttttaccttacctcagattgacagagagtgacaattggttggagctctcctaaggggcaactaagtgcagaccatttagtgagaagcaacagaattttagagtttgcaaaaaggctaaaatcaatatataataacaggagcgattcatcacgcaagtgattggattcataaacatggcagccggagcccaaaaggctgaaaagcccgaaaatacggcatttgttcccttagttaaatggatataacggggtcctcctaaggttcaatcatggttgagacttatggaagttgagaagtgataagtcagagttcgattccaacagggattgacctgaatgtcaaaataagatacaatggaaattcatcacaagagtgattgaattcatagatatggcagccggagccaaaaaagttgaaaagcccgaaaatacggcatttgttctcgtagttaaatggatataacaagcgcctcctaagagaaa

SEQ ID NO: 5148 - DNA, 55749 bp, Unknown
  gut microbiota DNA sequence
caaagcacttctgccggataagtcacatctttgtatgcaaaggtatgtttcatgccagcatctcctgccggaatcgcatcggattcttctacccagatacccaaaatatcgcgcagtctgcccggatatccgcctgtgatcacaaggtcatggtcttccacatatccgctgaaataggaggtcagaaaggtgccgcccgctttgacaaagctgcggatcttttcatcataaccgtctttgcacatgtataacatcggtgcaatgacaactttataaccggacagatcatcgtccacaccaacaaaatccattgggatatgaagatttaacagtgccttataatactgataaatctcctcataataattgatacaacggcttgggcctgcggataataccgttgcccaccagttatcccagtcaaatacaactgccacttctgtcggagttcttgcaccaagcagtgtatcagaaagttcagtcagttcttcgccaagtgctgtgatctcacggaacactctcgtattctcattgccgacatggtcgatcactgcgccgtgatatttttcacaggcaccaatgcttcttctcatctggaaaaacatgatcgtatctgcgccgtgcgctgccgcctgatagctgtataagcgcatcacacccggtcgctttaaggcacagtaggtatgccagttgctcacactcggtgtctgttccatcagtgcaaacggtttgccaccctttaatccacgcatcagatcatgtgccatcgcattgttttctgtctctgcgccaaaggaaggatagctgtcccaggaaataaaatccatttcttttgcccatttctggtagtctaatgatggataaaatcccatcagatttgtggtaaccggaatatccggcgtgtactcttttaccgcatcgcgctctaatttgtagcagtctaagatactgtccgaattgaatctgcggtaatcgagtgaaatcccctggaaattggtacggatgccatcccagttaaactcctctgaacgcatatccggcaaaacaacatcatcccagtcataaaaggtatgtccccagaaagaagtgttccatacacggtttaactcatccagcgttccatattttttatgcagccatacacggaatgctttttcacagttttcgcagtaacattccccgccatattcattggaaatatgccatgcaacgatattgtcataatctttgtatcgctctgccagttttgcggcaagtgccacagaatatttccggtaagtcgggctgttcggacaggaattgtgacgtgctccgaatttgcgtttcatgccgttatgcccgacacgcaggatatccgggttttttcttgccatccacgccggatgcgctcctgtcgaagttgcaaagcagactttcagtccgttttctttcacatactccatgatcttatccagtttggaaaaatcataggtaatttcatccggctgcagtgctgcccagctgaaaacattgagcgtcacgacatcaatgtgcgctaatttaaacaggcgcatgtcctctttccagatctcctccggccactgttccgggttgtaatctccaccatataaaattttatgtactttgctgctctcgatcatatttacctccaatttctgtgctgtatttttgcatctttttcgtattgctgttcctgatttgttctgttaaccggttttacctgtcactcgccctcgcggttcacacgctcgatctgtaagaatacacgtttgcttactgctgcgaccgtgtaaatgataaatccaggtccaaataagattccaagaaatatcatggttgaattatactggaagatcagcacttctgctgcgacgaggatcacaaggatcagtgtttttccaaaatattttcttgaaatatccatagaattctggatcgtgcggaccaccgtattttcatatcttgccagcagtgaaaaggaatagatcatcgcaatgatcacaagaaatacggacaccataccgatgatcagcaaaatgaccggattatttttcactgctccaaacagctggaagtcaagatataccgcataccatgcaaccagaaagatcagtcccatcggaacgccctgtttaaagtttgccttgtacgcttcaaaatatgatttcgcgatatagccctcctcatcatccgctaactttaacgcaactgacattgccgccgtggtcgatgccccgatcgtaaaaaccggcaggcttccaagaatccataaaaaatttagttttaaaatatcaagtactctgcttaaaaaacggtacaatggactgtcaacgctaaaaaatttcatttgttttcctccaatctcaaagtgcttcccatgcacttttcttatctctcattttatttcatacctctgatctgctttcatcatacaggattttactccagatatccagtatgatgaaaacagaccggggcgatccggacggaatgtccggatcttctgctctggtctgtcattcatttgtgatacaattatttgatggtcccttttacttcgttctcagctgcttttctaagtgatgcctcattctcctggaatgcgatacactcgtcatagccgtagtcttttgcctgggagatcatgtctgcaacgatctggtcgtattcagcatctgtcttagcatagattgctttccatgaatttgtcttgatgcactcagcaacctgtgtccataatacagttaactcatcagattttgtagactcagagtatgttgtaccaagagaaagtttgtaaggtcttgatcccatgtactcatctgctgttgcaaaaccggtcttatctctccaatcctgctcaatgtcagaatttgcatctgttgcaaaactttcccatttacgatagttgaatgtctcaccgtttgaatcaggatttaaggaatcaatcgcccacgttgtattgttcattttaaaggaaccatcatcaaatgttccgctgtaaccatcagacatctgtgtgctgatatctgtcttagctgcacgtcctaaatctgtaaactgcgtttttccattttcatcatagtaccagcagacatcctttggaccatactcagctgtcatacgtccttccggagtagataaccagtttaagatagccatacacaattccggatactctgtcttagcaccgatagaccagatacggtttccaccgtagatattctgaccatagcagatcggggttgcatcttccggtgggcaaggatacattgctttgccttcctgtgcatgtgaatctgagttgtagaaagtagaacctaagaagttgaacacatttaagaatgctccaccgttctggtaatcttcctgcataccgtcatatccctgtgtctgggagtcaggatcaagtagtcctttctgatacaggttgttatagaattttaagcatgtgaggtaaggtccattttcctctaatgctggatggaatacctgctcctctggatcatacagaccaaaaccaaattcatcatatccataataagcagttgctgttgattttacgaacattacaaggtttccgtcccagtcgttgaataaggaaacaccataagttgtttttccgttatcatcggtcgggcagatctctttcatctgacctaaaacatctaccatatcgtctaaagtcttgatctcaggatatcctaactctttgtaaagatcccatcttaaatcccaggtatacatgaaatcctgacgtgctgtcgcatcccttgcaacatcaaatccgaatccataaacagtaccgccggaaagatttgcatttttctctaatgcatatggcatgttctgtttgatgtatggaccgtaatcgcttaagatatcatcctcgttccagtcaaagagcattcccttgctgactgcctgctgatactcatcagaatcatttccccagagaaccagatctccaaggtttcctgactccatacgtgtctcatatacaccgtcagaatccgggatgatatttaattttacattgaatttgtctaacatgatctgaccaaaccatccgatctgctcaccggaatagtttgctaactgatcgaatacatcgagagtaactgtctcttccggaatgatatctgcgagatcttccgcttcatcttcggaagtttcctcggatactccactctccgttgcatcttcgtctgcagcatcccccgctgcattgttgctgttgttctttgatgcacttgtctgattgctacccccacaggctgccatggaaactgtcattgcagctgccagaagcagtgatacgattttctttgctttcatgtaattttcctccttgtttttgtgttattttgattccgcgcctcgcggttaacacctctttaaccttttacggcacctaacatgatacctttttcaaagtaacgctgcatgaatggatatacgattaaaatcgggattaccgttaccatggaaatcgtatatttgataacctttccactcattgctgattttaaaacagcctcgctgacagatccgccagactccattaatgcacttaagttggatgcctgatttaagtaaatgtaaagtctgtgctgtaaagtatataatttcggagctgatgtcattaagatcagggaatccgtaaaggagttccagtgaccaactgcaccgaaaatcgcaatcgtcgcaaggatcggtttactgagcggccagatgatcttgcggaatacagtaaagaagcttgctccgtcgatctgagcactctcttcgagttccgctggaattgactctatgtatgtttttaccagaatgatgttatacggagccacaataccaggaatgatgtatgcccagaatgtattggtcagacctaacatctgcatatttaagaaccatgggatcagacccgcattgaaatacatggtaatcacaagaaatctgtaccagaattttctgccccacatttcatctttggttaccagatatccgataaatccggatgctgctaccataagtgccgtaccaagtactgttcttgacagtgatacgatcaatgcacttgaaagatcacttacatttaataacgctgtatagttatcaaaatggattcctctcggtatgaagttgattaaacccttgattaccagatcattatcgctgatcgtattgataaacaggtaataaaatggaaatatacatgctattgtaaataatgtaaaaaacaggtaatttaaaatgttaaatacgatatcgcccggttttaagcgatatttgcgtttatgtgttttttcataaagtttttcggcttttaaatcagccttttcctgtgctgtttttgccatgtcttacgcctccttatacaatactctcgccacgaatcagtttcgaaataccgtttgcagcaaacagtaacgttacactgacaacggattttaccataccgattactgttgataatggaatctgtccctgtccgataccaagtttgtatacatacaggtcaagtaccatgatagaacttgtattggtagagttttcaaatactaaatactgatccataccattgcttaagatatttgcaatcgacattaacagtaatacacagaatgtcgggatcaggctcggcacggtaatattccacattctctggaaacgtcctgcaccgtcgacggttgctgcttcataaagctgctgatcaataccggaaattgctgcaatataaatgattgcactccagccgatacctttccataagccccaggctaacatctgcagccatacatggctgccgcccatcagcatattcacgccctctttccagattccggcatttaccatcaaactgctgacaaatccgtctgtagaaaagatacaaaatgcgattgcatatacaagaacccagctgatgaagttcggtactgttgtaagtgtctgtacgacgcggcggaacttcatgtttttaatctcgcagaggaaaattgcaaatgccattggaagccagcttgtcaaaattccaagaccactcattgcaagcgtgtttttcagaacacggatgatatctcttaccgttgcaggatttttaaacaactgcgtgaaccatttgaatccaacaaagttatccatgcttaaggtatcaccaactttgtaatcaaagaatgcatatctccatccccataatggcagataacaaaatacaccagccagtgccaggaatggcattaacatcaggaacaggcggtactttgtttccatctcatatttagcacccgcctcaaccttaggctgttttgccatcgcgatcaatgttacgatcaggatcagtactgcaacgatcaggatcatataaaaaccatttgaaaagatcggctcgattttcttaggtttttctgtctggctgatctgactgtatgcaagtgcgataccgccaagtcctgacagcatcactgcacttcctgctgctgtgaagatgttacttaattttttcattttcagattaccgagtgataaacatccaccggctgcaactgctgctgtaccaacgcagataatcagagctgatacagagtcaagccgtaatgttgatttcataacccatccttttcggaatgcacgtccaaactctgatgccagtgatgagtatgaaataccggaagtaaacagcgataagtttcttccgatcattccgctgatcctcgctggattgattccaggtatgaacatgaataagactgcgaacagaactgcgatccgaagtacaatgtataacttgcctgtaacaccggaaccatctgttttgttgttttttgaaatgcccgtttctttcatttctccctttcccttcttttttggttttcgccagcatccggagcttttcgaaaacgtttaagtattgttttaaaaaaaatatttccgaactgcttttgttgtatttattatataaaagggaagaaaattaaaataccgtaaataattgataaaatataccttgatttttggtcattcaaaatgagacatcaaaaaattggggtatttttgttgaataaataccccaattttctgactcaacagaattgcatatgttttaaatataattcctgaaactctggtgtatctgcaagattgatctcatgggatatggctgcaatctcttgcggctgcatatcactgctttcttttgagtgtgtcaggcaccgtgcggctccctctaaggcactgttgccgaccggcgtgagttttccgcgaagtccgattggcagaagtccgattccaagtgctttttccatgtcaagtcccatgccaaacccgcctgcaacatatactttttttatctgttcatgagaaatatttgatttctgcagtaatacttctaaacccgcacagatagctgcttttgccatctgcacctgtctgatatcctcctgggtaaaataaatttttccgggtacgaccggaaatcctttttcaaaccacggttctcccaaaatcccctgagtatcaacaatatggtgccgcacgagttcatacattacatcaatgattccggttccgcataacccaatggccggtttatttccaatcgtctttgtcaccatattatttttaccaaataaaactgcacggcagacagctcccggcacaccgggcataccgcaggatatgtttccaccttcgaatgccggtcccgcggcaacggatgagacaaggaaatgatctcccgcagcaagaaccatctcaccgtttgttccaatgtcgatcagcatctcgcatttgtccggccgcataccacatcccatcatgcccgccgtaatatctcctccaacaaaagctgagattcccggcatgatctgtacttttgtggtctgattgattccggtatgcccgcattctctgacatatccgtgttctctggcaactccactttctttggcatctccactttctctggtttcctcatactcaccattcaattctccccacgtcatatcctccggcgcaaggttcacaggagtaaatggtgcagcgccaagccccacacaggaatatcccagtaaaaggtgaatcattgtagtatttccggcgatcacgattttgctgacattcagcacattttcgtcctgccccgcaagcagtgtctctgccagattcctcacatcttttaaaatgctctctctcaacttttctgcatctccggacgctgctgcacggatccttgaaatcacatctgcgccgtatgcccgttgatgattaacagaagatgcagtttttaagcatattccatcggtgagggaaatcagttctgcagcgagtgtggttgttccgatatcgattgcgataccatagacggatttttccgtatccatattttccggttttatttccccgtcagaccctatttgtgcacggtcctctattttgttttcacagataactgttgtcgcctgtacatcgctctccatttttgtgttccggacaaattccatctgcacctgtatctgattttctctgatttccggaatgcatacatacagatcatccgtcggaaccgtcatacaggaaagacgccatccctcttccagttcccgctccgtaaacacttccttttcccgctgttttggcggatctgtttttcgtgtttcttctattataatacaacattttccacaggtacctttcccgctgcagggcgcatctaaatattctccctgctcccttaacagctccagtatcgtcttattctgttttttctgtaaaaaaatgcgtttcatcaatccttacccgctgcctttctctcacatttccgtttttcaacagcacctgtggtgccatagatacacgctccataaacttacttattgacataaattataccatattattgtttaactatatcaaaactgtttcgaccgtattattttcttttcatgcagaatcacatgttttccttgtttcaatgaaatgataatgttatgatatcttgcggaaacaatccagttttatctgacggtaacaaaaaattttaacaccaacatattaagatgttgagaccaaatagtgcattcccaacatcctattaaaagaatggagaatactatgaaactgatttcctggaatgtcaacggactgcgtgcctgtatccaaaaaggctttcttgatttttttcatgaaactgatgcagatattttctgtattcaggaatccaagctgcaggagggacagatcgaccttcctctgcccggttatttttcctactggaattatgccaagaaaaaaggttactccggcacagcgattttcacaaaaaaagagcctctgaatgtgacttacggtatcggcatcgaagaacacgacaaagaaggacgtgtcatcaccttagaataccctgatttttacatggttacctgttatacgccaaattctcaaaacgaactggccagactgccttaccgcatgcagtgggaagatgattttcgtgcttatttaaaaagactcgatggatccaagcctgtcattctctgtggggacttaaatgttgcacatgaggagatcgatttaaagaatccaaaaaccaaccggaagaacgccggattttcggatgaagaacgagaaaaaatgacaaagcttctcgatgccggcttcacagacaccttccgctatttttacccggatacagaacagatctattcctggtggtcctaccgttttagggcacgggaaaagaatgccggatggcgtattgactattttatcacttccaaacggatgaatgataagctgaccggcgcaaagatccacacggatgttttcggatctgaccactgcccggtggaattagatattgacctgtcataaagcttttcacggatatttttgattcaggccacggtacgatgtaactcgatatcgacttatcaacagctttctgcagaggatttgctgtgactgcagtggagttcctcttcaataagatatactccaccgcagtgccatcttcgtgcctttttgatcattctgaacagatatcatactgttacaaagtttttaatctaacgcatccactgcttttttcagttgcaaaaatgcctgttctaacgtttttctcggacatgcaatgttaatgcgctcaaaaccaatacccgttttcccaaaaattgctcccgcgtctaaccaaagtcctgcctgatcaatcagtgcttccaactcttttcttcccaatccaagttctccgaaatccagccatattaaataggttccttccggctcaatcagtttaatctgtggaagattttccttcaggtattcgcggacaaaggaaagattctgatacagatattcttttaactgtaaaagccattcctctccctcttcataagcggcctgacatccgacaagtcccatcagatttacctggctgtatcctgcctgatccaccgcacggacaaatttttgacgccgtttttcatccgcaataaaaatgtttgacacctgaagaccggcaagattaaaggttttacttggtgccgtgcaaattacggaaatctgttcaaactccggtgaaacagatgcaaagacatgatgtttatgccccggatatacaaaatcgctgtgaatctcatcactgacgacagtcacctgatatttgaaacagatctctccgatttttcttaattcccactctttccatacacgacctaccgggttatgtggactgcagagcaaaaataaatggatctgatgttcctttattttcgcctcaaaatcttcaaagtcgatctcataatgaccatcttttaataccagatcgctgctgactaactttctgtcatttgactcaatgacctgacgaaacggataatataccggctgttggatcaaaactgtatcgcctttttccgtatatgcacgcacagcggccgcaagtgcaaaaacaactcccggcgtttttaccagccactccggttttacatcccagtcaaaatgatcatgataccatcccgatactgctgcaaaataatcttctttgctgtcactgtatccataaattccgtgttccactactttctgcagtctttcggtcactgcaggcgcagtcttaaaatccatatcggcaacccataacggcaagacatcttcttttttcccacgttctttcgcaaaatcgtattttaaacatccggttcctctacgctccacagcttcatcaaaattgtacttcatgacatactccattccggaataccgctcctttaaccatcttttgtatttctgttattggctgctgcatcctgttttctttctattatcatctaattcatatcaaattagtatgatattagcattttcactattatatgtcaatagtactataaaaaagactgtccaaatgaaatatactttcttctttgaacagtctttttatcttttataaaattttatgaatttccatgtctgatatcgcggatcggaatattaacaaacaatgccggtaccgttccattgttcgactctgactctgtctgcgtgatctgaatgtcaaggccttccatatcaatatccatgtgttttgaaattacctggatgatctcgtttttaatctgctccatcatttccggggaacagcttgcgcggtcagtcaccagcaaaagttttaaacggtcttttgcaacatcaccggaacttttcttcttaaataagtccatcaatcccatgactgttcctcctaatttttcttaaataaatcttttaattttgaaaatactccctgttttgcatccagatcaagaaatgcaacttcctcaccgagaatacggtggcagatattctcatatgcctgtccagcaaggcaattacttccaaccagtggttccccctggttcgtagagattacgatatgttcatcatccggtactgcaccgatcagattgattgccagaatgtcgcacacatcttcgacattcatcatatcaccgcgtctaaccatgtccatacgcagacggtttacgataagatcaactttctggatctgatttgcctgaagcagtccaatgatacggtcagcatcacgcactgcagaaacctcaggagttgtaacgacaagtgccctgtctgcacctgcaattgcatttttaaatccctgctcgattcctgccgggcagtctaataaaatatagtcaaaatcctgtcttaaatcttcgatcaatgcctgcatctgctccggagataccgcggatttatctctggtctgtgctgacggcaaaagacataaattcggatattttttgtctttgatcagtgcctgttccacacggcagtttccttctacaacatctacaagattgtatacaatacggttctcaagacccatgacaacatccaggttacgaagtccgatatcagtatcgatcagcactacttttttgtttaactgtgccagacctgttccaacatttgcggttgtggtcgtcttaccaactccgcccttcccggacgtaattacaataacttcactcattttaaaatattcctcctgctgttaaatatcgcttaatagttcttttgtcagcggttcaatacagattgtcccgtcctttaagtacgcaatctgcggagacgtggtcgtttctttgaccttttttcgtattcttcgtctgctaaaaggtttgtccggactttttgctaaaatatttccaatccgaatctggattggatccatatcgagtgcaacaataaatgcactgtcatctcccccaagtcctgcatagacgcttccctttaccgctccaagtacaacgatactgccgtttgccatgactgctgcgcccggattgacatcacctaccactacgattcctgtttcactctcaagtgtctggccagagcgaagcgttccgcgataaaactgagtcccaccatccacatacggctgctgtacagatgcctgatattcttcgatctgctgtttgacgtatgcttcacgatccggatcatgatctacaatgcacaatatctcgatacttgtattcgatgtcaccgcatcaatgatagccatttcctcatcatgcgtcagctttcttccctcgaaagagatcgccagttttgcccctttaaaaaacttctctgactctttgaatttctcgacgatggcatccaaaagtgctttaaaagatatctcattgctcaatacaagatgtatcccgtatttattactttttataacaactgcctgtgacatatcgtccctccactttactatccgatttagtatagcagattcttgaaacaggtgcaatgcgacaggagaaatttgattgaaatttttatatttttttatatgcaatcggcaatacagctttcattgtctgtcgttttttgaaataactgcccgttttttatatttatcatattgccataaaagcggacatgatgcacgcacctgccgcaccacattcacacacgctgtctatttttccatcgttcagtccaattccaccgatggcatacacaggaatatttacggtttcacatacctgctttaaaaattccattccgcgtggcggcagtcctctcttacagtccgtggcaaatatatgccctgcggtcaggtaagatgcccctagtttttctgcctcaatagcatcctcaacagaatgaaccgaacagcctaagatcagcttatttttattcttctgatccattgacaggttcccagacataaattttatctgtttttcttcattttctgtcttttgcatacaagttcttaacagtggaagcggcaaatgaacatactgcctctctaaccgttttgcggtttctatataactgtgtaaaatacagatcactccatattcttcacaaattgccaaaacctgtcttgccatctcctcatattccgtctccggcagatctttttcccttaagatcagagctgccggctttgtttcacagactcttttgatctgttctaaaaacggcctctcacaaaggctccggtttgtgacagcaattattttccccggaatcggattttcttttttacacataaatataatcactcataacaggctgcaatccttcctcaagcagtgcatcatacacctgttttactgtccttccgtcagaaatttcaaactgctcgtcgccctgatcctcaagtcctttcgcatggcttccgataccggtgctgacccccgcagaaatctttgtcgctgcgatctccatcagactgtctctcacccttgcacactctctggtagaaaccgtaatacttgcatatggcataaacaaccggtatgccgtcacaacctgcaaaagttgtttttcatgcacatccatcggattgatcttatcattgttgatgatcgggcgaagcctcggacaggaaaaagcaatctctgcatgtggatattttctctgtaacagataagcatgcattcctgttgcaaatgcatcttttctgaaatcatcaagtcccagtaaagcagcaaaaccaacgcctctcataccgccgcggatcgcacgttcctgtgcctccatacgataaggaaaaatacgtttatgtcctgccagatgaagtgtctcatatttgtctgaattgtatgtttcctgaaaaactgttacataatccgcgccgcattcatgcaaatacgcatattcctccgaattcatcggataaacttcaagaccaattactttaaaatatttccgcgcgatcttacacgcttctcctatatattccacatctgacattttccggctttcgcctgtcaggatcaagatctcctgtagaccggattttgcgatctccgccatttccgcttcgatttcctctgcatttaattttgccctgcggatacggttatgacagttaaacccgcagtagatacaataattttcacaataattggcgatatagagcggcgtaaaaaaacagaccgaattgccaaaatgattttctttttccacttttgcacactgtgccatctcttcgataaacggttctgctgccggcgacagcagcgccgcaaaatcttccggtgtgcggtttctttttgccaaggcacatcttacatcttccgctgtatagctgtcgtaatcgtatgcctccattgcttcaaccacccgttttgtgatatccgattttaatgcctccatgcctggcagatataccatatggtcgatccttgcctctttctgatgttcctttatttcttcgcttaatatactttcattgatgtgttccatgattttttcccctgtgcttattctgaacccgaaattttttatactcaatttccattcaaatcagatcataaaaatgtattatattttccgattccaaaatttcctaaaactgatttttgttctgctctcatatttaacgctctgatcttctgaattattcagagaggaatcctgtcagcggcgaggacgcgcttgcccctcccattttgacacgtccacagcctgagaggtatgcctttcttccggcttcgatcgcttcacggaaagcagctgccatcgccgggatatcaccagccgtcgcgattgcagtatttgccatgactgcagcagctcccatctccatgacttcacatgcctgtgacggctttccgataccggcatccacgatgatcggcaggtcgatctcatcgatcagtatctggataaaatcttttgtacagacacctcggttagaaccgatcggtgctgcaagcggcataatacatgctgcaccggcattctgcatatcacgcgccgcattgagatccgggtacatatacggcatcacgacaaatccttcttttgctaatacttctaccgcttttgctgtttcataattgtctggaagcagatatttcgaatcatgaatgacctcaatttttacaaaatcacttccgctgatctgtcttgacaatcttgctatacgaattgcctcctccgcattgcgcgcccctgatgtatttggaagcagtgtcacatttttggggatgtaatctaagatattagccacaccaccctcatttgcgcggcgcagcgccatcgtcacgatctccgcctttgcctctttcactgctgcatcgatcagttctaaggaatattttccggaacccaatataaatctggaagaaaactcatgctctcctaatttccatgtatcttttgttatttcgctcatctttttttcctcttttctgcttttctctttttttacttttctctgtttttctgcttttctctggtttttttatttctcttttgccggcatttaacaaccgccgcccatgaaactgacaatctctaaaatgtcgtcatccttcaaaacaacttttgcataatcttctttgtctaaaattacatagttgtactcgactgcaatctgcgctaacacatagtgattctgctctaaataatcaagtatcgttgttccctccggcaactttgtgtgctttccgttgatttccatacatcctcctttaattttacggagtaaaatccaagtccctttggacgaggggaggatttttctccttttaattttacggtgtaataaaaaaagcgttcacgaaagaatacacccgcggtggtgtaccccttcatgaacgctttgttcactctgtttgtgataataacatgatacagtggtgaagtcaaggaaaatccatgtttcactttaccctccctctaaaaggatgtatactgatacaaaattcacaggacacattttcctatgaatccaaaaatttctggcagaaatggagaacccgatgaatacaacaataaataaaaaccagacatggtgttccatgtggggaaatgcagtttcaatcgcagaacaccgccctgagagctatgcaaaagatatcacactccgctatccggtctatgcgccgtttgatggaactgctttaagatttacctttgataattactgcggcagtgaacctgtttccatcacgaaagcaactgtctccatcgcagactgtgattttaattgcgatgacattacaagaaaaataaatctttcctgtcccatgcaggaatctgcaacagcacagattactttttccggaaattcttccgtgacgatcgccgcacacgagcgcatcataagtgatgacattttctttcaggttcaggcaggccagactctctgtgtcaacctttattttgcggattttaccctgatgcagtcagcagttctgatcacaggccctctctcaaagggatttttttcactgggagatcagacttctgccggcaggcttccccttgatacaagcaaaacgacaaactggttttattttctgagtaacattgatattttgacatctccggacaatcatgccgtgatctgctatggcgactccatcaccgcgcaggcatggccggacgaactgatgctccggctgttacgggaagggaaaaaacatacttccgttatacgccgtgctgcgagcggtaccagaattctccgccagtatgactgtattacctatgattcttacggtttaaagggaagtaaccgtttttcacatgaaataccaacttccggcgcagacaccatcattatccagcaggggatcaatgacatcattcacccggtcggatgcgacatcaatccattccgccccatgagtgatcttccaactgcagaagagctcatagacggtctcaaatggtacgttgatcaggcacatgccctgggattatctgtttatatcggaacactgcttccaatcgaagactggcgcacctatgcacctttccgtgaagagttaaaaaatcaggtgaatgaatggatccgcctgacggacggttttgagggatgtatcgacttcgacctcgcagtacaggatcctgatcatcctgcagcattcaaagccggctatgacagcggcgatcatctgcatccgagtggtgccggttacaaagccatggcagatgctgtacctaaatcctttctctattaaaagacggtctgccctgaggactttttgatcacaggacgtagtttcctatgaagattcggggtggcaaaaaaaatcgcaccaaagcggattttcatcccgtcctggtgcgatttttacagcattatatatgcccgtcagtctctcatttgtacctcttagctctatgcttcctctaaatgttttcttactctctggatcagcatctccaacgcaactgcattttccccgccttccgggataatgatgtctgcacgccgtttgctcggctccacaaactgctcatgcatcggttttaccgtcgttaaatactgatttatgacactgtctaacgaacgtccacgatcttttacgtctcttacgattctgcgcagaatacggacatccgcatcggtgtctacaaacacacggatatccatcagttcacagagactcggctctgcaaagatcaaaataccctctaatacaatgaccggtgcaggttccactaggatcgtcttatcggaacgattgtggatcgtataatcatagaccggcatctgaatcgcctttccttttttcagctctttgatatgttcacataaaagttctgtatcaaacgcatccgggtgatcataatttaactttgagcgatcctcatagttcatctcgtcatggcgtttgtaataattatcatggcgaagaatactgacttcatcacgtccgaagctgtcaaccactttatctgccaacgtcgtctttccgcttcctgttccccctgcaattccaattaaaattgtattttttgcttctgccataataccgtatcctttcatatcctgatacaggaaaaatcctgttatagaacgcaatttcctgcgaacgaaaaaagcaagcggaacttttcaggaaccacttgctctctcatccatccggcattccggaatccataagccaatagtcggactcgaaccgacgacctacgcattacgaatgcgttgctctaccaactgagccatattggcaatctgaggtgtgttgtctttcgactcacgccacacttattcattatatataatttatataaaaaaagcaagaccttttttatatttttttaaagcttattttctattgacttttcctataaaatgcataaaatagtcttgtttacttattgtaaacaaaacatatatttttacagttaccaaaaaattgcagaatggagattagtctgaaaaataacatttttcacacgcaagaatggaggttcgcatggatatcggaaagcgtatgaaagagcttcgtatccagtacggtctgacacagcaggaacttgctgaccgctctgaactgaccaagggatttatttcccagctggaacgcaaccagaactctccgtccatcggcacactgcttgacatcatacaatgtctcggcacaactcctgccgaattttttacggacgaagaaccggaacagatcgtatttgaaaaagatgattattttgaaaaaatcagcgaagatggaaataaaatgatcgaatggatcataccaaatgcccagaagaacagcatggagccggtgcgccttactttaaaacccggtggttcctccgacacgcatctgccacatgcaggcgaagaattcggctatgtattaaaaggaaccgtgcgtgttttttacggtggaaaaacttatactgtccgggcaggcgaatctttctatttccaggcggggaaaaaacatcgactggaaaataacggcaaccgtgatgccatcctgatctgggtttccacgcctccaagtttttaatctgtattttacataccacttagaaagggataacgttttttactatataaaaataagaagcgttttgaacacaaatgagcaaaaaattaatcaatctgacaggtatttcaaaatcctacggcgatcacgtcgtattagatgacttaaatttatatatccgcgaaaatgaatttatcacactcctcggcccttccggctgtggaaagacaaccaccctccgcatcatcggcggttttgaggctccggatgcaggaagcgttgtctttgacggcaaagatatcacgtccctgccgccaaacgagcgtaacttaaatactgttttccagaaatatgcccttttcccgcatatgtcaatcgcggaaaatatcgcatttggtctgcggatcaagaaaaaaagcaaagaatatatcaatgataaaatccgttatgcactgaaattagtgaatctggaaggttttgaaaaccgctctattgattctttgagcggcggccagcagcagcgtatcgcgatcgcgcgcgccattgtaaatgaaccgaaagttctccttttagacgaaccgctcggtgccctcgacttaaagctccgccaggacatgcagtacgagctgatccgcctgaaaaatgagcttggcatcacgttcgtgttcgttacccatgatcaggaagaagcacttaccatatccgatacgatcgttgtcatgaaccaggggtacatccagcagatcggtacacctgagatgatctacaatgagcctgtcaatgcatttgttgccgactttatcggtgacagcaacatcataaacggaaccatgatccaggataaagttgtggagatcttaggtgtgaagatcccatgtgtcgacgagggattcggctgtaatacgccggtcgatgttgtaatccgtccggaggatgtcgagatcacagagcctggtgccggttttatggatggtgacatcgtatccatcatctttaagggtgtacactatgagatcagcattatggcaaacggctatgaatggctggttcacaccacaaaaatgtatccggtgggcacgcatgtcggcatcaacgtgatcccgtttaacatccagatcatgaacaaaccggaatctgaggatgaggaggccgtggagatcgatgcgtaaattaggcagacagcttttagcaggaccttatctggtatggataatcggatttatcctgctgccgatcgttattatcttatattatgcgtttacaaatacttcgggtgcttttacctgggacaatatcgcagcgattgcagacccggtacatgtaaaatccattctgctttccttaaagctcggatttttctgtacagtagtctgtctgctgcttgcctatccgcttgcgatgatcttaaacagttttcattttaagcatcagagttttgtcgtatttttatttgtacttccgatgtggatgaattttatgctgcgtatccttgcctggcggcttttactctccaacaacggtatcgtaaacgcactgtttggtctctttggctttggcccggtgaaaatgttaaatacaccgaccgccgttgtattcggcatggtatatgactttctgccatttatgatcctgccgatctataactccatagcgcgcatcaaaccggacgttatcgaagctgcaaaagacctgggtgcaaattcaaggatcgtactgatccgcattatctttccgctgacactctccggcgtgatcagcggaatcgtcatggttttcgttccggctcttacctctttcgtgatctccgatctgctcggcggtggtaaagtgcttttgatcggaaatgtcattgaacaggaatttatgcagggaagcaactggaatttgggctccggactttccgttgtacttatgattttcgtcatcgcaagtatggcggtcatgaatatttttgataaagatcagggaggaactgctgtatggtaaagaaggctgcatcccgcatttatcttgcggtcatctttttatttttatatcttccgattcttgttttggtcgttctttcctttaacaattccaaatcaagagtcgtatggggcggatttactttaaaatggtacgcctcctgttttacagacaaaacgatcatgaacgcactgatcatgacgctgcagatcacactttgcgccgcagtactctccacgctgatcggcacactcgctgccatcggcatcagtgcgatgaaaaaacgtggcaccacactgatgctcggtgcaaccaacatcccgctgttaaacgcggatatcgtgaccggaatatcactcatgctgctttttgtaaaatttttaaatctgggctttgtaacggtgctcattgcacacattacatttgatatcccgtatgtgattctaaatgtacttccaaaattaaagcaggtaaaccggaacacctatgaagcggccttagatcttggtgcctccccgctttatgccttttataaagtgacctggccggatatcaaatccggtgtgttttccggattcttaatggctgtcaccatgtccctggatgatttttccatcaccttttttaccaagggtgccggtgtgaacacactttcgaccatgctctacacagaacttcgaaaaggtgtacgtccggagctttatgcactttccacactactgttttttgccgcatttctgctgctgcttgtcatgaaccgcagatcgtctaagaacagccagtaattacagatacgccgtattatccggcagatcgtgaggatatcatgaaaaaatatattgtttttccgcttttacttctcggcgctttttttgccgcaggctgtggaacaaaaaataccgctgacgataattcgctggtcgttttaaattatggaaaatatatggacagttctgttttaaaactgtttgaacaggaaaccggcatccatgttaaattagaagaatatgaaagcccggaggaaatgtatacgaaatataaagccggttcgatcggttatgacttaatctgcacttccgactatatggtagaacgtctgatctcggagggcgaagtaaataagatcgacttcagcagtttttcgaattaccaaaatattgatccgtcgatcatcgatgcggcaaggatctttgacccggatgcctcttactccatgccctatttttacggaacgctcggcatcctctacaataccacgatggtcacagatgatgaggtgtcctcctggaatatcctgtgggatgaacactacaaagattccatcattatgcagaattctgtccgtgattcgtttgtcccggctcttcgcctgttaaattatgacatcaatacagaaaacaagaccgaactgaataatgccgttgatcttctgatcaaacaaaaacctcttgtgtacgcctattatgtggatgagacttccgatgaaatggctgccggaaatgcggcaatggcattagtttattccggggaagcagccactgcgatggaattaaatgatgacctctcctatacggttccaaaagaaggttccaacctctggatcgattcctggttcattccaaagagctgtaaaaatcaggaaaatgctgaaaaatttctcgatttcctatgccgtgaggacgttgccatgaaaaattttgattatgtctgctatgccacaccaaaccttgctgtgattgatgcacttgacgatgagactctgagtgataccaccattttcccgccacaggaaacactggataactgtaccgtgtacaaacagtttgatgaatccacaacttcgctttacagctatctctggaaaaaattaaaatccgaataatttttcttgcatttgtagtatgcatgtgttatagtaagtccacgcagtgttttgcgtggactttccccattttagaaacagtaatatcttctcctgcaccgcggatttatcgtggatagattcgtatttacaggaggtctttatgacatatcagacatttaaacagcagatcagacaatctttacaggacgcatttggttctgacgtttccattatcctgcaggacattttaaaaaataacaatacccacttagacggtctgaccgttttaactccgggctgcaatatctcaccgaccatttatctgaatgactattttcatgcatatgaaaacggccggcccatttctgatatctgcaccgagatcagggacatttatcagcagaacaaacccgcccacagtgttgatatttcctttttcacatgctatgagaaggttcagtcccgcattatctttaagctgatcaattacgagcgcaacaaggcgctgttaacagatgttccccattttcgttttcttgatttggcgatcgtattcaactgtctgatcggcattgatccggacgatatcagtcagtcattttcagaagaaaagatttcctgctctccgtcagcctctggcagctctgccacgatcctgatccataaccatcatctttccttctggaatatcacaaaagatgacctgtatgcacttgcatgcaaaaacacaccggatctccagcattatgagcttcgcaatatgagcgacgtgctaaaagaacttctttccgatgacgacagctccgccatccttgctccaccggcaccttttccgatgtatgtgctgtccaatcatacaaaattaaacggctctgcatgtatcctgtatcaggatctgctaaaaaacttcgcagagcacttaagaagtgatctttatatccttccaagcagcatccacgaagttctcatcattcccgtcaattcttttgccacaccggccgatcctctgctatcctccgcaaacagtcccgcagatacccgtcagcagtcctatcgggaactctcggaaatggttcaggaagtcaatgccacacagctttccacagaggatattctctccgaccatgtatattattattcaagggaaagcagccgtattaccatgtaaattatttttcaaaaaagtgaccgtattaccatgtaaactttgtcaccagactgtcgtacaacttttcatattctgccaccgatgcgttccaggagaaatcctgactcataccgtgttttatcagtatatcccagtcatttttatgctggtaaaatacggataacgcataacggattgtcgctaacatctcatgcgcattataatttgcaaaggagaatccggttccctctttcgtatattcattatacggaatgacggtatccttaagaccacccgtttcacgcacgatcggaaccgtgccataacgaaggctcatcagctggcttaaaccacaaggctcaaacaaagacggcatcaaaaatgcatcacaggaggcataaatctgatgggcaagttcctctgaatagccgatatgtaccttcatcttatccggatattttcccgcaaagtaagacagcatatcctgatatcgtgcctctccggttcctgccacaacaaactggacacgctcggtactgagcagttcatccatgatatatgcgatcagatcaaaccctttctggtctgtcatacgcgataccataccgatcagaaatacgtccccgtctaccggaagagacacatttttttgcagacgtgttttgttgagtgcctttccttccttataattcacctcgttataatgattggtcagatagacatctttctgtggatcatattctgtataatccaggccatttaaaataccggaaagtttatccctgcacgcatacataagtccttctaatccttcaccgccctctggtgtcgtgatctcataggcataagtcggactgactgtggtgactgcatctgcatagaccacaccgccttttaagtaattcgcctcaccgtaagactctaacttatctgaggtaaaaatctgttccggcagtccggtaatatccataactgcaggcagtttccatcttccctgaaatttcagattatggatggaaaataccgtctttatacccgtatagtattcctcatctccatataaagtacgcaaaaataccggaagcagtcccgtctgccagtcatgacagtggatgatatccggacagaaatcaagatacggcaatgcctctaacactgcttttgaaaagaatgcgaacttctccacgtcctcataaatattgttgtacggtgcatttcccgcaaaataaaattcattgtcgaccagatagtaagtaattccatcatacgttgtttcaaaaatcccaacgtattgtttcctccagcttaaattcacataaaaatggcataaaaaatgaagctgtcctttccaccgttcttccatgcagacatatttgggaagaatgaccctcacgtcataattcttcttgtcaaaatattttggcaatgagcctgttacatctgcaagtcctccggttttcataaaaggcacagcttctgaagccgcaaataatatttttttcatgtcataaaccctccagccccaaaaatttattcttctataaacttttgaaaatctaaagaatattataactcttttttacttttctgaaaagtattaatacattttatgttccagacgaatacggtctgtgatcagcgcgataaattctgagttggtcggctttccttttccattgtggatcgtataaccgaacatctcatcgatcgtatccatctttcccctgctccatgctacctcgatcgcgtgacggatcgctctctccactctgcttgatgttgtctggtatttctttgcaatcgtcgggtataggatctttgtgatggaatttaacatctccatatcattcacggacataacaatggcatcccttaagtactgatatcctttgatatgtgccggaactccgatctcatggatgatctccgtcacatccgcttcaagactgcgctcgctgaccggctctgccttttcatatgcatttatcttacgtttttccattccgggcacactgcggtttttgatccgtttgatccggtcaatgatcatatcattatcaaatggtttcataatgtaatacgatgcccccatgttgatcgcatcttccgtgatacgatcttgtccgattgcactgatcatgataaatgccgggtgttttttgatcgttttatccttgttcacacggctaagtaccccaagtccgtctaactttggcattactatgtcaagcagcacgatatccggctcttttgtttttatcacacgataagcttcctcaccgtcttttgctgttcctaccacattcaactcatcatcactttcgataatatcccctaataactgtaacattatctcattatcatcagcaattgctacacttaatttttccatttcaagccctcctgtgacaaaacaatagaaagtgcgcctcgcgaactttctattatcataaattatttgtaaattgatgatacttattttcactcaaattattttgtcgaatgtagtcgtcaagcgcaaaaatttacataaattatgaattattctacaataatacgaaatccatcccttccgttttcttttacttcatacaatgctttatccgcatgttcaatcagactatttctgctttcctgtctgcttggcaggaaacttgcatatccctgtgaaatcgtgacggctgcctgtctgccagaatccttatcttctatatgcagctgctgcagttctttttttatcgtttctgcaatggaagtgatcgtattttcttccccgttctggatgagcagaacaaactcgtctccgccaaatctgtatgctttcccacgtttttccacggcattcttcaaaacatcagcaacatgctgaagacaacgatccccctgaatatgcccatatgtatcattatgctgtttaaaacaatcgatatcaatcactccgacagcaatcttttcgcctgttttcattgcatgttcaatcacatccacagcgtctttctctaacatataacggttgcccagacctgtcagtgcatcctgattggaacgtatctccgcatgtctgcgttgttcttccttttcctgaagttcaatctttaagtcgatcgcacatgcacgttcctcattgtctgcttttttctgctgctgagccacatctacatagtgaatgcagagctttacatactgctcgttgtccccaagctccttatagtaatccagccacatttcattgagaatcatttcataataaatgctgttctgtttctttgcatgctgctcaaatgccagaatcactcttttccacttgtcaaactcctgcatatctttcagcaggccgcacaagtcacttacatcttcaatataatctgctgcatttgaatcatcaattccaccctttatcaattcatccaaatgctcatacacatattctttttccccaatgttccagtaaagtcttgatttcaatgtcagataagagtatcgatacatttcattcacaataccctggctgcatttttctaatttaagaagttccttgcgtgcatcgtcaagccggtcaagttccccataggacttcatgagattcatgtgtgtaatcagatacctgatctgaaaattctcattctctgtgtctgtcactttttcaagttcatctgcagacctttcaaaatatccaatcgccttttggtgctgccgtaactcctgatatctggaacctatgttattatacgccaatgccagaacggatgttattccatgtctttttgaacactctaacacttctaaataacaatccattgcagccgattcatttccaagcgacacatagatgacacccatcatattctgcgcaaatgcatactgttcataatttttttccatccgatagatatcgattgcattctgcgttaaagttgccgccttatttaattcttttgaaaaaaaggctgtccggccttcctccatatattccgccgctaatttctctatttcactctctgtatgcatatgccacccatttacaaaaactgtcactttttgtttcataataccatatttgcctgtgatgttaaagcattttctcaatgaatatcccataacccctggtcggatcattgacgagcacatgtgtaacggccccgatcagtttcccgtcctgtatgatcggactgccgctcattccctgtacgatcccgcctgtcagctctaaaagttcagggtctgtaacccggatcaggattcctttattttcctcttttccgctgtaatcaacactttccaccatcacttcatattttttactctccccggaaacagacgatacaataaacgcacttccggtcctgatatcctgtttataacgcacctcataacactccccggtttctaaccactttaagtttccgtttaagactccatgaatcccaagaccggtgttttgcatgatcgaacctattcttgtactgtccccgtattgaataataccggaaagttctcccggagtgcctgactttcctttctttatgcctacaatatctgtatgataaagatacccttccgccatactcatgattgttccggtatcgctgtcactcactgcatgtccaagtgctgcataggttccatctgctttgtaataagtaagtgttcctactcccgcaaggtcgtccctcacccagacaccaagcatatattttccactgacactctttaccggatccagggaaacctcaatatattcctcgccacgcatgattccaagaatatcttttcctcctccggcttcgttcactgctgcagcaaggtcttctttctcgctgactgccatcccattgacactgacaatataatctccgctttttacaagattttctgacggctttacctcccgtccatccaccctctccacttccccattcccgatcacaagtactccttttgttttcgcataaattccaaccggcattccactggcataaaccgtttccggttccaccagcataaccgtgatatctttaacgggaaaaattccaaataatctgcaatttacacaatacgtaagcggtgaatcttttgtcagatattcaaatacctccgtactgtcctgctttagcacaacactgaccggaacatcaaaatcataagataccgtttctcccgctctcacatatatctcatccggcacagcattctcaaacgattttaccgcaaaaatcaacgtaaaaaagaatcccatacaggtaagattttgtataattctgtaataagcacttatctttttcattctctctctcctgttttccccatctttcgcaaaaaaagaagatatcctgtttcgatatcccctttttattatatgtgcttttttctttttcacgctgttatttatccaaactgccctgccacttcctgacacaccggcctttttttggaatttttattttttcttttttgcggcaagttctttcatttcccgcgcactttctcttaccttatccgtgatttcaacaccgccaagcatacgggacagttcgtccacggtttctgccgtatcaagccgtctgatctttgagacggttgcgccgtttgagacagccttctcaatcagataatgtgcatccgccatcgcagcgatctgcggcagatgtgtgatacagatgatctggtgtgtacgtcctaaaagattcattttctcggaaaccatctgtgccgtgcgtccgctgattccactgtcgatctcatcaaagatcagcgtctccacctcgtcctgatcggcaagcactgtttttatcgcaagcataattcttgaaagttctcccccggatgccacctttccaagcgggcgtaccggctctcccggattcgtcgagatcataaactccgcatcgtcgtatccgtttgctgtgtaatttgacagcacgtcaaaccgcatttcaaatacaacatctaaaaagttcagatctttcaatgcttccgtcactgcaataaccagtttttctgcatattttttgcggatatcggacactttttcacagcttttctgcagttttttctccgcgttttttactttttcttttaaatcagccagataagtatcataatcttttaaccggagcagccgttcctgtttcgcttcgcatgcacttaatatttcctcaatagaacttccatattttgactttaagtgattgatctcatccagacgtttttccagatggtaaaatgtctcctcgtcaaaatctgtatcatccagataatctgcaatctcccggttaaagtcacctagcagattgtcgatctgcgtaagcgtttcttccatatcagcaattttctcatcatacactgatacgcctgaaagttcccttagcgcacgtccggtcagctctgatgcctgatccatccctccggtatactgatacgcctgattgagtgcttccacaatttttttcccattgatgaaacgcttatactgtgtctctaattcctcatcttctcccacagtaagtccggcctcttcaatctcaccgacttcatattccaaaaacgaaacttcccttaagcgttcttcctcatccacgtccgcatcgtttaactctgacacaagtttcttatagtccttatatgcctctgcaagctcctttttcggctgctcgatctcttcctttgcataactgtcaaggatctctaaatgctttttcttcgacaaaagtgactgatgctcatgttgtccgtgaatgtcgatcaaaaccgaagcaatttcttttacttttgaagcaggcacactctcgccattgaccttcgagacaccgcgtccacccgtgatcctgcggcttaagatgacctcatcatcctcagtctccacatcaagctgctttaacacctgtttctgcttttcggtaacagaaaaaatgagttccaccagcgctggtttttccgggttacgcagcatttctttctgaaccttgcctccaagtgcaagattgattgatccaatgataatggactttccggcaccggtctcaccggacaggatatttaatcccccggcaaaatcgacctccgactcatcaatcagtgctaaatttttcacatgcagattttgtaacatagaatctccttcctgcgcattcccgcgcattctctcccggaagtatctcctcttttctgacagtctgttattcttctacaattttgcgcagccgtcccataacttcaacagtttcctgtacacttctgactgcacacatgatcgtatcatccccggcaatacatcccacaacttcatgcaggtgcatggcatcaagtgccgcagccaccgccattgccattcctgataccgtcttgataacaaggatattctgtgccatatccatggaaacaaatccatcgcggaacactctggtatatttttcagacagatcttcgcttgcctccatcagtgcaacatatttctgcctgcccccgttgactgccacctttgtcagcttcaattcccgaatatccctcgaaaccgttgcctgcgttacctgatatccttccctctctaaataatccgataattcttcctgtgtttcgatgttattcttttttatcagttcaagtatttttgcctgtctctttgttttcatactttctcctgttctaaagataaatccactattatgtataagcgctcatcttcctgcgcaatatttcaaggaaactttcactgctcaatttacagatctttgccgtatcttccgccctgcgcaccacaaaacgatcgcccacttccaaacgaactttgctgtctccgtcaaaactgacttccaccatctcgtctttctgggagcgacgctttccaagttctacggtaacttcctcatctgcactgatcacgatactttttgagcttaagttatgatcattgatcggcgtgatcagcatcatctgtgccttcgggtccacgatcggacctcccgccgacatattatatcctgtagatccggttggtgtcgatataatgattccatctgcgcggaacgtattcagatattcaccattgacatagacgatcagatttaccaccgaaagtgccccggttctgtgaattaccacatcattgagtgcgatatccgcaggcagtatctcaccacccttgatcccgtatccgccaagcatcatccgctcttcgaccatgtagtcgtctttcatgagcttgtcaactgctgcaaatacgtctttttcctccagctcacacagatatcccagtgtccctaaattgacaccgatcagcggcagtctgctctttaccaaagctgctgcggcacggatcagcgtaccgtctccaccgagcaccaaaactccctgtgtattttcagggatatcttccctgtgcggagccgcctcacccggtgtctccccattgctgaaaaaagtgctgcaggaaccaccctttttctcaatgtattctttaatgtgattggtcagcctcgcctcagaatccttataatagtttgtgataatcagaaaatttttcatttatttgtccagttctccatgtgccgcatctaccactttttgtacatcgacagattcttccacgcctgcctgttctgcctctgcctcttttttcagatgcaccagatactcaatattgccctcaggtcccttgatcggcgaatattccagatgaagcacggaaaatccgattgaaagtgcgaatgatacgaccttatcaattacttcctcatgtacggatttatcgcgcacaacacctttttttcctactttttctcttcccgcctcaaactgtggcttgatcaggcacaccatttcaccgccatctgccaacagttctcttgccgggccaagcaccttcgtcaatgagataaatgaaacgtcaacagatgcaaaatctaatacatcatcgatatcctgtggtgtcacataacggatgttcgtcttttccatgcagaccacccgcggatcctgtcttagcttccatgcaaactgaccgtatccgacatcgacagaatacactttttttgcgccgttctggagcatacagtctgtaaatcctccggtcgatgccccgatatccatacagactttgtcatttaattctatatcgaaatgcgtcatcgctttttcaagcttcaatccgcctctgcttacatatttcagcgtatttccctttatctcgatctttgcctctgtatcaaacatggaacctgccttgtcctcgcgctcattttccacgaacacattgccttccatgatcatcgtttttgctttttccctggacggtgccagtcctctgtttaccaacaataaatccaatctttctttcaatgaatctgtatcctttctgccttataatggatgataaacctctttgatccgttttaatatggtatccgcatcaataccgacttcgtggtatagaatatccacatttccatgctccacatactcatcagggattgctatattaagtacattcacatagattccctgttcgttataaaaacgggtgatatgctccccgaagccaccatttatgacattctcttccatggtaacgaccagtgtatgtttcgatgcagcctccattaacatctgtgtgtctaacggctttgcaaaacgggcattgataagacttgcaggaataccttcctcccttaatgccgcatgcactttttcagccgtcttaaccatcgatcctaacgcaaccagtgcgatctctgattcacgatagatccattcactcttgccggcggaaatcggctgcctgtattctttcaacccgtcatacgcttccccacgcggataccgcactgcgatcggtgtcggaaaatcaacggcatacttgatcatatcggaaagctcccatttatttttcggtgccatgatcgtcatgttcggaatcgcagacagataggatatatcgaaaataccctggtgtgtctctccgtcactgccgacaagtcctgccctgtcgattgcaaaaacaaccggcagattctgaatacacacatcatgcaggatctggtcatatgcacgctgcaggaaagatgaatataccgcaaatatcggttttaaccctgccgccgcaagtcctgccgcaaacgtaactgcatgttcctccgcaattccaacatcaaagaaacgacccgggaacatattatgaaaacgtttgagtcccgtaccatccgtcatagccgctgtgattgctaccactttttcatcacggtcaccaagcttacgcatcacagttgaaaaaatatccgtgtagtttgctttcactctcggtttgcttggcaatccggtctcaatatcaaacggctccgtaccatgaaatcttgccggatggcgctcggcaggcagatatcctgcacctttgtgtgttaaaacatgtaccatgaccgggccttcaatattcgacgcttctttcagcagtcttaagattcccttcatatcactgccatcaaccggtcctaaataaatgatgcccatctcttcaaaaagcatgcccggaataaacagctgtttgattccactcttcgtcttacggatccgctctaccattttattgccgtaaaccggaatcttgtttagcgaattcatcacgcccattttcagatccagataggcatctgccgtccgaaaaccggacaaatatgtcgagagtccaccgacattttcagaaatagacatattgttatcattcagcacaataataaaattagattttaactgtgccgcattattcagagcttcaaatgccatgccgccagtcagcgcaccgtccccgatcacagatacgaccttataatcatcgcccgcgatctctctggcatgtgcatagcctaatccggcagaaatcgaggtggaactgtgtcccgtatcaaagcagtcacagtcgctttcttttcgtttcggaaaaccgctcatcccgccatatttgcggagtgtatcaaagttttctcttcttccggttaacagtttatgtgtgtaggactgatgaccaacatcccagatcagtttgtcctttggcagatccaaaaacagatgaagcgccatggtaagctccaccacacccagatttgacgccaggtgtccaccggtaaccgatattttctgaattaaaaattcacggatctcatccgctaatatctctaactcttcctctgagagttctttgatatcattttctttttttattttttccaatatcatactgacttcctctgtttcccggttctctttttgtaccgatttattcaggatataatgagcgcaagagagtcaatatgcctgcataattgacgaacggcgaattggatcatgtgctgtttttgcacaggatataatgagcgcaagagagtcaacatgctcgcatgattgacgaacggcgaattatttttcacgcgaaatcagatagcgcaataattctgtcaggaattcatttttcacaaccagtgtctccatctgtgcgatcgccttttccgaaaggtctgcaacatcctgttttgccttctcgattccttcatacgtcacataggtgctcttgtgattcttctcatcactgccgatcggctttccaagcacttccatcgtacttgtcacatcgaggatatcatcctgtatctggaatgcaaggccgacttttgatgccaccgcttccacgatcttctgttcacttccggtcgccccagcaagaacagctccaatcatcatggacgcctcgatcagcgcacttgtcttgagacgatagataaaatcaagtttttcttttgtcatatcacaggtattctcagactcaacatccactgtctgtccgccgaccattccataaattcccgcttttgcagacaaaatacggattgcttttccaattcccggattctgtggttcgatatccagtgccttcgccgccgtctcaaatgcatatgtcaaaagagcatccccggcaaggatcgccattgcctccccatacaccacatgtgttgtctttttgccacggcggtattcatcattgtccatcgccggaagatcatcatgcaccagtgaatatgtatgtatcatctcgattgcagccataaacggctcgattactttcgattttccaccaaacagccggtaagtctctaacataagaatcggccgtaatctttttcctcctgcaagaaaactgtaattcattgcttcgatcacagttttctggtatcccttttcctctggcagataggaagttatgatctgttctgcctcatctgtatgtctgcctatttccgctttgatatccatatctgctcctccatatgcaccgtctgcatcttaaaaatcttccagttcccctttggcatttaaaatctgcatctttttctctacggtatctaacatcacattgcactcttttagtttttccacaccgctctgatacagcaaaaatgactgttccagtgaaatctccggctgttccatctgttttaaaatatcctcaagctctgcaaaattatcttccagcgcaggcttgttttttgtttcatcgctcatgcaaaacctccgtcacctctgcctctaacgcaccttttaacaggcggattttcacacggtcacccgctttcacaccctctgcatctgtaagtgtatgcccgttttcatctgtcacataagaatatccctgtgcaagtttttttaccggcgacacaccctctaatctttccgaaagcagcgccagcttatgcctgcgcagctcaatcatatgctccatgcggtttcttagctgttcttccagatctgccgcatattttcttttttcgcgcagctgcccctcagggctcagataggaaagtctgtcctttgcatgttctaattcttttcgcatctgctggatgcgctgcatattcaataagaacatccgctctttgatctcgccaagtcttccctccactgccgcataatcaaacactgcaagttctgctgctgccgacggcgtcggtgcccgcagatctgccacaaaatcagcgatcgtccagtctgtttcatgaccgactgctgaaataaccggagtttcacactcaaaaatggctcgcgctacctcttcctcattgaacgcccacagatcttcaatcgaaccaccgcccctgccgacaatcatgacatccaccccaagcgcatctaacgcatggattccatttacaatactctctacagcaccatccccctgcactaaagcagggtataaaatcagctgcacaaacgggttacgtctcgcagaaatattgcggatatcctgcaccgcagcaccggtcggtgctgtcacaactccgatcttcattgcatacggcgggatcggctgtttgtattctgccgcaaacattcccatttcttctaattcctgtttcagagcttcaaacttctggtaaaggtttcccgcaccgtcaagttcgatttctcttgcatagatctgatactttccatcacgctcgtatacttccaccgaacccgtcacgacaacctggtcgccttctttcatctggaacttcagaccttttctgctgcccgcaaacatcactgcgttaagcgtcccggctgcatccttgatcgtaaaatagatatgaccggacgtatgatatttgcagttagacacttctccctttacactgatccgctgtaacataaaatcctgggcaaacatatttttgatatatgtattgacctgccctacggaatatacgtttttcatcataccagttttgccagtacgccatttacaaatgaaggtgaattgtccgtgccgtactgttttgcaagttccaccgcctcgttgattgcaactttcgccggtacatcttcctcatacagcatttcatacactgccagacggatcaatgtcagatcaacttttcccattcttcctgttttccagccttctgatacctcattgatcttcgcgtcgatctcctcaatcttttcagaaatcttttctactttttcaaaaatatatgtcttgtctttttctttccagctgcaggcatcatcctcacacaatgcaatctgctctgacatctcttcctgattataaaattccacacggaacagcattttaaatacctgctctcttatctctcttctggtcatattcttttcttctgtcatcctttcttcttgtattcttttacgcataaggaaaaaggatgtcgcttaagacaccctcttttcttagaatagcattatttattgttgcccatgtccacacttgcgatacggatgttcactacggatacttcaagtcctgtcatattttcaatcgcattttttactctgtcctgtactttggcagatacctccggaatggaataaccataagagatattcagcgcaacgtccacattgacggttccctcaagcacctctactcgaatgcctttggaaagattcttcatgccaagcttactaacaagttcatttgtaatgttgccagccatggaacctaccccttcaacctctgtagcggcaagccctgcaatgatggcaactacttcatctgctatcttcacttctcccaaattaccatcctttattttaaatgtttttctatcctcacccatcgctaattgcctcctaagtgatattataaacttattataacagactattcttgttttggaaactaaaatttgtataaaaccgggattatctgtcagaatggtagtatctttatctttaaatcagtttgatatagacatctaactgctgttcttacaattctgccactaaatctgcaaattctccgagctctcctcgtaccgcataggtttccagggcattgtaataatccagtcgattttcttttgcgatagataccggccattcccaactggcggaacatgccccgcaccactgatccgtacttcctgattccggtaaataccaccaactataatattttctgtcaaaattgcatgaatatcctttacaataggttcatccagtatttttccttccgcaatgcactttttaacatactgatacgccttcttgtgattgacaacttcatatatttcacgcagttcttttccgcctacagatattccatcttccagtactaccttggtttccatcagcgtcaatgtattaccttctatagctgtggaattatgtgtaaaagttaattcaaagtctttttcataggaagataatattggctttgcacagtttttgactttgagtcatttcgatagtatggctcatgtgaacgttaatacttatcataacctaactgatcgtccatttcggcttctaacattccctgaattgtactagccagcaaatttttaaagcgccttatatatcattaacagtttctatgcaaaagtagttatttttttaaacaagaagattaaagtgaagaaacgccagaatcgacatccaccgaatctagcgtttctttatcatagaatcattttacagccctttgcttttactcgtccttataagtatttcttacatttttaagctttgtctgtccagatactgctattccaacaacatctaacacatctacttctaatccaggatagtacggataaaatctattttgtttccattgactaacggtcatatctccagaagcctttttgaaaaccattcatatgcttgatccaagcaagaaacggcatctctacaaaatgtaatattatatttagaattattccgtatataataacagtcaaaataatattgtgacatttctatttttgttgtatcatatacaaatttaatatctggataatatacatcaacatttacagaatagatatatccatttttcatctcataaatccataataaatcatcaagacaacttgatgatttcaaataccgaacccaatcttaaaaaaataactgcatcacaacacctcatttttacgcaaaaaaagagaagaaagttttcacgttcttctcatatttttgtcatatcagagttctattttcttttattttttggagtgtgtatgctacacactatctacacactttcgctatcaaaatatgtgccattttatacaattttataattttctgaagcaaaccaaatacggctctaagtctctatttccgggaaaacgccttatttccgggaagacgaccttatttccgggaagacgaccttatttccctacaatctccgccgtatcaatgaactcatacggtgtcgtctggtacacatagtagttcagccagtttgagtagaggatattcccatgtgaccgccactccagcctcggctttttcgtatcatcatcatccggataatagttgaccgggagatcgatcggcagtcctttttctttatcacgtttgtactccttgtcaagtgtgacacggtcatactccgggtgtcccatgacgaaaatgcgtctgccttcgtctgcgattgcaaggaacacacctgcctcatcagactcggcaagaatcgtcagatccggtattttacggatatcttccgctctcacttctgtatgtctggagtgcggtgccataaaataatcgtcaaagccgcggactaacggcactttgcggttcatgacatgatgttcaaacaccccgaatacctttttgtccagcagatgctttttcaatccataatgataataaagtcctgcctgtgcaccccagcataaatgcatcgtagatgtcacatgtgttttcgtccattcaaaaatatcacacatttccttccagtagtccacttcctcaaattccatctgttccaccggagcccctgtgatgatgagtccgtcaaaataacggttttttactccatcaaacgtctcgtagaatttgtttaaatggctcatggatgtgttttttgactcatgggacgatactgtgataaatgtcacattgatctgcagcggtgtgttcgacagcgaacgcaagagctgcagctctgtgtcttcttttaacggcattaaattcaggattccaatctcaataacgcggatatcctgatgtgttgctcgactttcatccataacaaatatattttccttctccaatatctctttcgccggtaaatcactctgtgttttaattggcataacattctccattctctgagcaacttgttgcgaagcggcgacggaaatttcaaatttctgtctgccataaaagatatttgttttgctcagaaacaaatatctgtgtggcaaataagctatcgagcttatttgccacactattctccattctctgcgctgattccaagcagtacaaacagttctgcttccgtgagcaccgtgattccaagttcctgtgcctttgtcagtttgctgcccgcactctctcctgcaacaacataatctgtctttttcgatacggatcctgatacttttccgccgtatttctccaccagttccgccgcttcttttcttccaagtgtcggcagtgtacctgtgatgacaactgtttttccactgactgccgaatcgatcgtctcggtctcttccgcttccatgttcacacctaaagactttagtcgggcgatcatttctttatttttttcatcatggaagaaacggaaaatgcagtctgcgctgacttccccgacatcgtccacctccatcagggcatccctgtcagcatcctctaaatcaaggatcgaaggaaaacgtttcatgatcgtctttgcggcagcttttccaacattcggaataccaaatccggtcagaagcatgtatgcatcattttcttttgccttttcgattgtttctaaaagcttgtctgtattcttttcttttccgataataccctgttcgatcaactcttccctgtgatctttcagttcaaatatatcggcaatatccttaatataccccaaacgaacaagttcttcaatataaactgtaccaaatcccttgatatccatggcatccctgccgacaaaattgatgatatggcgttctaactgtgccggacagtttggtgaagtacacttgatatccgcagtatctttttcacgttctgtctttgcaccgcagacagggcagacatccgggattgcaaagcgtttccagccctccgtccttttttctttgcggacttcttttactttcggaatgatctctccggatttgtaaaccacgatcgtatcgccaatgccgacatctaaatcatcaatgaaatcctgattgtgcagtgttgcccttgaaacagacgttccacacaggcgcaccggctcaaacacggcagtcggtgtgatccttccggtccttccaacggaaagttcaatatcaagcagttttgtttccttttcttccggcggatatttgtatgcgattgcccattttggaatttttgatgtatttccgagcagttccctgtccgaatagcggttgatcttaatgaccgcaccatcgatatcgtagccgagatttccacggttttctccgatcgctgtaattgcattccagacttcatccgctgttttgcatactttgtaatcttcgatgatcgggatgccctgtctctttaaaaattcatatccctgcgtgtgagtcataatgtccatgccacgcacctgctggatattaaatacaaacatggaaagttttctctcttttgtcacgcggctgtcaagctgacgcagcgttcctgctgcgcagtttctcggatttgcaaaaatcttttttccaagcagttcctgctgttcattgactctgtcaaaatcttcatttttcatgtagacttccccacggatctccaaatattccggtttgtcctttaatttctttttgacatctgagatcacttttgcgttcgcggtcacatcctcgccaaaattcacaccatcaccgcgcgtcaatgcaagtgaaagatcgccattttcataacgcagcgccatggacagcccatcaatcttatattcgaccacaaactccggatcatcaagctgctctttcatctgctctacaaaatcaacgacctcttcttttgagaaaacatcctgaagacttaacatcggcacattatgatgcactaagactccggcagtccgctttgccgtgccgccgacatgctgtgtcggagaatcttttgtcaccagttccggatgctctttttctaattttttcaactgctgcatcagcatgtcaaattcataatcagagatctcaggactgtcctgattataatatctgtcactgtgataattgatcttatcccttaactctttgatctgttcttccggtgtcatctgtctcctccatcccgtccgtgaatcactgtcgtatttgatgaatcttttaccagcctcatcaactctttatattcctgcggagttacctcgcggtaagttccggcttttaaatctcccagttcaatattcatgatacgggttcttaccagtttttccactctatacccaaaatattcacacatgcgccggatctgacggttcaatccctgtgtcagtataatgccaaactgccttttcccgatcctccatactttgcatttgcgcgtcgtggcatttaattccaccagtggaactcctcctgcaagtccacgcaggaaactgtcggtcacgggcttgttgaccgtgacgatatattctttttcatgcatatttccggcacgcatgatgcggtttacaatgtcaccattgtttgtcataagcaataagccttcggaatctttgtccagccttccaatcggataaatccgtttcggataattgatgtaatccacgacattattcttttccctcttttcagcggtacatacaattccggttggcttgtgaaatgccagaagtatcatttcctcttctttttttaccggctttccgcaaaaaagaaccgtctggtctggcaatacttttgctcccatggaagcaaccacaccatctatcgtcacatttcctgcttctacctgacggtccgcctctcttcttgagcacacgcctgcctcgctgagatatttattgattctgactggctcctgcatttttcacctttctctttctgcacaaaagcggagacttatctttaaagtctccgccatttctactgtggctacaagtctgttactaaaaatgtgccatccattgtatattgaacatttactgtaacagggaagtcttaatataaccggtctgtccattccaggttacctttgtccatccctctgcatagctcataactaccgtgaccttctcaccggaaaaagctgttccgatcttgctgtcgttctcgctcattcccgaacggatatttatggaatcactcagcgtaatgactgttccctcagctataaaattgcttgtggtcgtctgctcttcatttccaccgttatctgaatcagaatcggaatttttcgttgtaagatactctgtcttaatatatccggtctgtccgttataatttacaacactccactctccatctgtacctgttcttgtaagtgctgtgcctttctctaacgttccaattttatcggattctgtatctgcggctgctctgacatttacagtatctactgcataaacggtatccggctcaccctgtgtcggtgtatcttccgccggctgctccgtattctcctccggtgtctcagtctgctctgattctgttgtttcttccggagcctgctctgtgctctctgtctcggtattctggctgacgatcgtgcctgcccactcagtgatcgcattcggaatcgtcgtggagatcatctcacttaacttatcatccgaagcaatggccgtgtcatatttaccctgtacttctttctgaagtgtattgacatcttcgctgtcctcgtactcactgatcaggttctgaatgcttgtatctaacgcattttctttaatctttaaattgtactggctgtaaaggttatcaatgtatacactgccatcttcattcgtgcgcacatagaagaaatccagtcccggcgcaaccgtatctacatctttaaatttcacttcaacataaacggatacaagataagaagatgcatcaagcccctgttttgtgtagcatttgatattctggtatgcatctacatactggctgaatacggaaatataacttttttcattttcagacagcggggttgcgattgttgaaagtgtatccgtgtctcccgctgcatatgcggtatagtactggttgatcagtgtatttacatcttcatgtgcatccacctcaaactcctgttttgcgtcatctgatgcctctgaagctacctctgttgccgcaacattctgtccattctgtggctgtttcggagatccgacctttactaaaataagtaccattgcaaggaacaatacccctgctgtaatataacgcacattctgttttataaatgtaagaatcttatttgtttctttattgcctgtctctttattttctgtatctttttttaatttatcatcaacatttgaagaagccatcgtattttccatccctttccttttgttgtataaaacgccataaaatatgtaacaggcgtaacatataacatgccgcctgctatctgactgtcaaaatgcacccggcgggaatcgaacccgcattgccggagtcggagtccggtgttctatccattagactacggttgcctgctcttactattataagggatctgcagcataaaaaaaatgttacttttttacgcacgttttatcatagcagaccataaaataattgtcaacaaaaaatgccggtgcaggttacggcattcttcctcatgcgtgtattttcctgctttccggcatttcttaaaatttaatgaagatattttaacatgcgatccatcagatcttttttctcactttcagattcttttcccatcatgactgccacccacactgcggtctttgatattttcccttcgcccagaaaacggatatcctcttcgctctcgctgttttcgcggtaccggctcacaacccggtttaatttcgaaaatatctccatcagtctgccaaaatcattttctctttctaaaatcatggtttcgccatgatttctttcttcccccgcggttgcaatgatctgcatgcacagatgcaattcacccgtgatatcagatgcctccattaatacatccggtcttttttctcttgtctccaaaaaaattttctttgccagatcaacatcgcggtttctgaaacattcggcaagacacctttttaattcaccggtctctgccttttctccaagcattcccactttgcactcatatacacgcagctttttcactgtaacccacacaagcaggagaaattcggaaataaatccaaatactcttttatggtaggcatcttcccccgtttctaattcgatccgctctgccacctcaaagaaaatggaaaacagccaggatgcatattcatcaaataatatttttgaagtgacaaggatatttccaaaataagtctgtctgccatttacaagctgttcaaatgcatccgcatattccggatatttctctgtaatgacctttcctgtcatctccagtgcccgtatattgtggtttgccaaaaatccgtcgtaataagaattgtttaacaggacttttttggtcgtgaccagatcgtattttcttaacagttcccggtattccttctccgtatagatctgttctttttcgttgatcagataccgtctgtaatggcaggtgccgacataatcggcatcatggcagtttttccagatccagtaaaacccggtcagctcactgtaataacagttcagcgctgagatctgttctcccgtatcatcccccaaatatcccagattctccccgcatgcccttccgacatgaagcggtacataaagcggatccggcaggggtgtaaattttttgtgtgtcatggtatatatgcgcatggacatgatgtgtcctcctttgtattcctgttgatacaattttttttacatcatctgctaataaactataccacaactatcctgtttttttaaccgatcccgtgttctttttttatcatttctttcatcccggttaaaatatccgctgatcttttcaactgcattttttcttcctcgtccagtgagatcggtatcacgttctccacaccgtcctttccgacaatggcaggcatgctgatcacaatatctttcattccgtaaatgccatgcatcatggaagataccggaaggatcgactgttcatttcggatgatacattcacagatccgctttaccgccatcgcaatcccataataggtcgcatgcttgcgttcaatgatctcgtaagcgctgtttcttactttttcatagatacggttttcggattcctcatgcataaaatgaccacgcatttcgcaaaaatcactcagacggacaccggaaatattcgcattggaccatgcggcaagttcactgtctccgtgttccccgatgataaacgcatgcacactgcggttatctacccctaaatgctccccgatcagatattttaaccgggcggtatcaagcactgtcccggaaccgatcacgcggtgttccgggaaaccggaaagtttcagtgccgtgtaggtaaggatatcgaccggattggatacgataagaaggattccctcacagccgcgctttgcgatctccgggatgatctgtttgtatatctccacatttttgtggatcagatcaagccgcgtctcatccggcttctggtttgcacccgccgtgatgataataattccggcatctacaatgtcatcatagtccccgtcatatatttttaccggtcttgcaaatggaagtccgtggcttagatccatcgcttccccctccgccttcgcgtgatctgcatcaatcatgaccatctccgaaaaaataccgctctgcatcagcgcaaatgccgatgatgcgcccacgaatccgcagccgatcattgccgcttttctgatattcattttgtccatatgattttcctgctttctgccgcatgaatgtggctttttctcatagtgtttcctgtttgccggaaaatttatgcagctatttttcttttatgtatccggaacgaaaatgaattccatacccggcaaaatctacacgaaaaaaggatgccgccaaacgacgacatcccatatcctcttacgcaacaacatcctcaaactgtgaattataaagatttgcataaaatccatttttttcaagcagttcttcgtgatttccctgctccacgatatccccgtccttcatgacaaggatcagatccgcattgcggatcgttgagagtctgtgtgcaatgacaaaactggttctgccacgcatcagattatccatcgctttctggattgtgacctcggttctcgtatcaaccgaagatgttgcctcatcgaggatcaaaatcttattgtccgcaaggattgcccttgcgatcgtaaggagctgcttctgtccctgtgaaacattgcttgcatcctcatttaattccatctggtaaccacccggaagtgtcttaatgaagtggtcagcatgtgccgctttcgccgctgcaatgacctcttcatctgtagcttctaaacgtccgtaacggatattttccatgatcgttcccttaaacagccaggtatcctgcaataccattccaaacgcatctcttaattccctgcggttaaaatccctgacatcatgaccgtctaatttgatggaaccgctgtttacatcataaaaacgcatcagaagctttaccatcgtagtctttcctgcgccggtcggcccaacgattgcaatcttctgccccggtttgacatgtgcactgaaatctttgatgatcgtctgatccgggttgtaaccaaactgtacatgatcaaaatcgacggttccggttacggcactcacatctgccggatgttctacggtctgatcttcctcttcctcatttaaaaactcaaacacacgctcagatgctgccgccatcgactgtacctgattgatgacctgtgcaatctgctggatcggctgtgtgaagttttttacatactggataaatgcctggatatcaccgatcgtgatcgttccacggattgcaagcagtccaccggataaagccactgctgcgtaaccgagatttccgacaaacatcatgatcggctgcatcatacctgacaaaaactgtgatttccatgcagactgatataaaatctcattggtgcggttaaattcctcaatcgtgtctttctcacggttgaatgccttgatgactaaatgcccgccataaacctcctcgacctgtccattgatatgacctaaatattcctgctggtctttgaagtatttctgggattttttgaccacaaatgagatcagtgccatggagatcggcaggatcacgattgcaatcagcgtcattaacggggagatacttaacatcatgatcagcaccccgactaaggttgcaaccgacgtgatgatcgttgtgatactctggtttaatccctgtcctaaggtatcgacatcattggtgattctcgataaaacttctccgtaagtacggctctcaaaatacttcatcggcatgcggttgattttcccggagatttctttacgcatgcggtagcagatcttctgcgttacaccggtcataatccagccctgaataaagttaaatgccgcactgcacacataaagccctaacacaaataaaaggatctgtccgatataggtaaaatcgatgcttcccgtgccctggatctttgccatcagtccttcggagagcgctgtggttgcctttcctaaagtcttaggcccgattacattaaataccgtggaagccgccgcaaaaatcatgactacaataattgcagctttaaaatttccaatgtaagataacagttttcccagagaaccctttaaatccttcggtttttctcccggctgcatgccgcgccccatcggtcctctgccacggtgctgcattctaactttttctctttcattactcattgacagacacctcactttcctctatgccaagttcttttgccgaaagctgtgaacgtgcgatctgctggtatgtctcacagtttttcagcaattcttcatgcgtaccttttccgacgatctttccatcatcaagcacaaggatctgttctgcgtgtaaaattgtactaattctctgcgctacaatgatgactgtgctgtcttttactttcgatgccagtgcttttcgaagtgccgcatccgtctttaagtcaagtgcagagaaactgtcatcaaacacatagattttcggctgttttgcaatcgcacgtgcaatggcaagacgctgtttctgtccaccggaaacgttgcttccgccctgtgcaatatcgctgtcgtatttttcctgtttctcctcaataaaatcggctgcctgtgcgattgctgccgcctctttgatctgctcatctgtggcgtctcgttttccaaaacgcaggtttgacgcgatcgtaccggaaaacagtacacctttctgcggcacaaaaccgatttcttccctcaaatcttccatacggatattccggatatcctgaccgtctaaggtaacacttccgcctgtgacatcataaagtcttggaatcaggttgaccagcgtggattttccacatccggtacttccgatgattgccgttgtcttacccggctccgctgtaaaatcaatatcctccaacacatctgcctccgctcccggatagcggaagctgacatgtgaaaaacggatcacacctttgtgttctcttaattcttccggattttttgcatcttctatggaagactctgtgcggataacctcatcgatacgttctgctgctactgctgcacgcggaagcatgatcgacattgctgtcagcattaaaaatgccataacgatcatcatcgcataggtgatgaatgcagtcatggaaccgacctgcatggaaccggcatcgattttgtgcgcgcctacccatacgatacctacggtcagaagattcataatcagcatcatacccggcatcataaatgtcatgacacggtttgtaaacagcatggtctttgtcagatctttatttgcagcatcaaaacgtttttcttcctctgtttccctgccgaatgcacgaatgacggaaagtcctgttaagatctctctggataccagattgatcttatcgaccagtttctgcatcagcttaaaacgaggcattgtaacagacatcaataccatgacatagccaaggatcacaaggattgccagaataatgatccatcccattcctgctcctgtctggatgatttttaatacacctccgatgccaagaatcggcgcataggcaaccatacggatcatcactgcagataccatctgaatctgctggatatcattcgtacttctggtaattaaagatgcagtggaaaaatgatccatctccgcgttagaaaaacgaaccacctgtccaaatatctttcctcgcaggtcacgtccgattccggcaccgatacgtgcaccaaaaaatcctaccagaaccgttaccacacccataagaagtgccatcgcaaccatcctgccaccggctgaccagagataggatgtctgtaccttatcaatatccactcctgccgctgtatcacagcttactgcatacgcgatacccattgattttaccagagaacttcccatggtatcgatcgtatcagaaacggtatcacgcatggataagatctgttcctctgtcattgcccctgacgcttccatggcggcaaaaattgtacgcatatccacgcaattcgtaaccacggtatttccgtcgtcatcctcgacttctttctcaaaagatgtaagcggcactcccatggactccccgatctgctcgatactcatgttatcaagcatcgcctgatccattccggtctgttttgccacactctctttaaatgtctgctcatccaccgatgacatctgatagttcatcagaagaggaagaagcagcgtatcatccagttcatctaactgttttttatctgtaacggtcagacggtaaacatctccgtccttttcgtaactgttttcccagcttttcttctcctcatcggtcataaaaagctgtgccagtgtaaactcatcctccgttactgcctccggcagcacatgctccacacctttgttctggattccgacatcaataatatccgatgtgtatgccggaagagacagatcacaccacgcctgtacaactaacagtgcaacaacaatgatcagtcccttccagtacgggagcatatttttaaatattttgctcatgtcctattctcctttttgtctcatttttcggtcttcgatttcttccctcgacgcctcgtaaagctcattcaggcaatcgatcagctgttccatgtcatcccggtctatttttgagatgactgcatgcgcaaagctgctcatgatctgctcgcactcttcctgcttctgttccccggatgccgtcagcttcacataagtattgcgcctgtctgctttgttgacgtcgcgctcaatgtatcctttatcttccaacgtctttaaggtgcgtgaaactgcaggtcccttcgctttcagctttgcggtcaattcggaaaccgtcagttcttccttttccccactgcagtgcttgatcgccgccatcgtcatgccctcaagtttcgtgatatccggcaccagatcacccatatgcagtttgtgaaactgatacagcgcaaaaaaaaatcttgtaaataaatcatccattcctgtttttctcacctcattatttaacattgttatatattttctttgttatttatttacagtggcatatattaacacagggaagataccacgtcaagtatcttccctgcactttatccattctttatattttctttattttttattcacatccctcatgcagcatagcgagcgtttgctgcatttcttccagttgaaactgtcccggtgcacttttctttccatgcgacgcaaatgtcacacaggaaccaaaagtttctccgctcactctgctgactgcccccagttttcccatggacacggtaatgatcggtgtttcctgattttcactgtgaaattcagaagtaacggcaagcagccgcaatacatcttccgttgtttttggagtcacaacaagtttgacaatatccgcacctccttcacacatatggtcaagcagcatccgcattacatctatctgcggtgttccttccagatcatgatgtgatgccacaactttcttcccctttttttgaatttcccggatccgctttgccgcatgttcctcctcaaaaaattccagatcgatcagatccacacattctgactctgccgcaagatcgtgcagatcatttaatgtttcccggtcaaccgacaccactccaccctgttttgcagtacgaaatgtatacaaaaacagttttttctttaataaaggcgctatctgctgcaatatttcccgcacttcattgtagtcggtgtaatgttcaaatgcatccagcctccattcgatcatgtctgcatccgatttcacgagatattccacttcttttataacttcttctttcgttttttcgagaaccggaacgcatatgagcggacgtcccgttccgacctctgttccttttattttcatgccagacacctccctgccatctcacaatcatcttcttttttcattataaccaaccccctcctgttatgcaaatatttgacatcttctgcaatatcatttaatataatttttgattttagcgcttagaatggagtttttagtgtgaaaaataagtttgatagcttatttttcgcaataagttgctcagaaatgaggattattatgagttttacatttttaaaccagcttccttctccggcagagatcaaacgggattttccgctgtcagaagaattaaaacagttaaaaaaagaacgggatgctatgatctccgacgttatcaccggaaaagatgaccgttttctcgttatcatcggaccttgttccgcagaccgggaggacgctgtctgtgattatgtcagccgcctcacaaaaatccaggaggatgttgccgaccgtctgatcatcattccgcgtgtttatacaaataagccgcgtactaccggcgagggctataagggtatcgcctcccagccggatccggaaaaagcgcctgacatgatcgaaggtctgattgccatgcgtaaaatgcacatccgtgcgattaaagagagcggtttaacctgtgcagatgagatgctctacccggaaaactgggggtatgtcgaagatcttctctcctacgttgccatcggtgcacgttctgtcgaggatcagcagcaccgtctgacggtcagtggttttgatgtcgcatccggtatgaaaaacccgaccagcggcgacttttctgttatgctcaactccgtatatgcagcacagcacccacatcatttcgtataccgtggttacgaagtggagacaagcggcaacccgctgacacatgttgttctgcgcggcgcagtcagcaaacacggtaactccacacagaattaccactacgaagatctgatccgtctgtgtgacatgtacgaaaaaatggatcttgtcaatccggcagccgttgtggacgtaaaccattccaactccggcaaaaaatataaagaacagatccgtatcgtaaaggaagtcatgcacaaccgtcaggtttcttctgaaattcagaagatggtaaaaggtgttatgatcgagagttatatcgaggaaggctcccagaagatcggcgaacacatctacggtaaatccatcacggatccttgccttggctgggaagattccaaaaatctgatttatacgattgcagatatgtgccgttaagattttttacctgtaccggcagctgcttgaaatctcataatgaaaaaaggaactccatttctgtgagttccttttttattattcatgacaatagagtgtttgcagaacatgcattctattgtttctactactatcc

SEQ ID NO: 5149 - DNA, 12172 bp, Unknown
  gut microbiota DNA sequence
aacttttgctccctcagcctcaagtttagctttgatatcctcagctgttgctttgtcagctgcttcttttaatactttcggagctccatctactacgtctttcgcttcttttaagcctaagcctgtagcttcacgaacaactttgataactttaactttgttcgggccaacttctgttaactctacgtcgaactcagtcttctcttctgctgctgcgccctcgccagcacctgctgctgcaactacaacgcctgctgctgcagatacgccgaactcttcttcacaagcttttactaaatcatttaactctaatacgcttaactctttgatagcatcgataaattctgctgttgttaattttgccattataattttcctccattataatttattgtcgcaccggtcagtctctcctgccgtgcccatatactgtttcatccagccgccggatagattactctgccggtgtctctgctggttcttctgcagctgctgtttcttctgccggagcagcctctactgctgcatctgccgcaccgcctttttctgcgatctgattgagaacgcgagcaaggttggtaatcggagactgtaagcttccaagtaatttggaaagaagttcttctcttgatggtactgctgcgacagccttcatgcctgcctcatcataataagtaccctcaacaacacctgctttgatttcaagagcaggagctgttttagcgaacttagctaaaactcttgccggagctgttgcatcctcagtagagatagcgaaagcattcggtccttcaagaacgtctcttaagctttcgaactgagtaccttctactgcacggcttactaaagtatttttgtatactttgtaagtaacaccagcttctcttaatgctttacgtaactgagtatcttctgctacggtaagtccacggtagtcaactactacgaccgactgtgcatctttgatgttttcagaaatttcctgtacgataggctgtttgagttctacttttgccacgaatcgtgcacctccttttattattttgccgacggataatccgccggatcacagtgattttctcactgctgctgcataaaagacttgaggtatataaaaccgctttattcagattaaaatctgcaataaaaaactccctgcaaagacagagagatacggtcaaaaaaatcttgataaagatcccctcggcaggtcgtcttacgtttacgccatatggcacctgctgtcttcggcatatatgcaaatcgctgagtaccggaaaaccggctcaacgatttgcattataacattgtatattatggttgtcaacaattttctgcttttactgtgtaattttaactacgtttaatcttacaccaggtcccattgtagatgcaagagttgcactcttaacatactgaccttttaagcttgcaggttttgctttgttgatcgcacccataagggtctggaagttgtcgcttaactgttcttctgtaaaagaagcttttccaactggcacgtggataatgtttgttttgtccaatctgtattcaatcttaccagctttgatgtcgttaacagcttttgtaacatccatagttactgttccagccttcgggtttggcattaaacctttcggtccaagtacacgaccaagacgtccaacaacgcccatcatgtccggtgtagcaacaacaacatcgaagtctaaccatccctcgttctgaatcttcgggatcagctcctcgccgcctacgtaatcagcgcctgctgcctgtgcttcatcaaccttggttccttttgcgaatactaaaactttaactgatttaccagttccgtgtggtaatacaactgcaccacggatctgctgctctgcatgacgtccatcacaacctgttctgatgtgaagttcgattgtctcatcaaatttagctgttgcgtttttctttaccaggctgattgcttcagcaacatcgtactgagcagccttatcaaaacttttcacagcttcctgatatttctttcctcttttcattctaaaaaaacctcctggtggtattatcgggagagggccctcccacataatcgttaataaatatcgttaatttttgcagaatttctcagaagaatgccgttcttgcattcttccaatgaatttgctgtttttgcaaattctattcttccactgtaacacccatacttcttgcagtaccagcgatcatgctcatagctgcctctaaagatgctgcatttaagtcaggcatttttaattctgcgatttcctgtaattttgctttggaaagtgtagcaacctttgtcttgttcggtgttgcagaaccagatttaatgttgcaggctttcttgattaatacaggagcaggcggtgtctttgtaacgaagctgaagcttctgtctgcgtatactgtaataactacagggatgataagatctccctgatcagcggttcttgcgttgaactgttttgtaaattcaacgatgttaacgccatgctgtccaagagcaggtccaactggaggagcaggtgtagccttgccagcaggaatctgcaatttgatatatccttctactttctttgccatttggaattgcctccttaatccaatgtttcaggcataatctcatgcctgcgcacagatcctggtctgtgctttaattgttaagttttacatctgcgaaacttatttctaccggcgtctcgcggccgaacaattcaacattgatcgtcacactctgctttccgtgattcatcgcctggatcactccgatagtgtctttccagacacctccggtaaccacaacggtgtctccctctgtaaagtcaacttcaatgttctctttcttgattcccaaaggtttcatttccatatcggtaagcggaaccggcttgcttcccggaccaacaaatccggtaacaccacgggtatttctgacaacataccatgtgtcgtcattcataaccatattgataagaacgtatcccggaaacattttctttgatacggatttttttgcgccatttttcatttcgacaacatcctgcatcggaacgcggacctctaagatctgatcttccagatgtctgttttcaattgtcttgtcaatgttcgcttttaccttattctcatatcctgagtaggtatgaacaacataccagtgtgcctctgccataaatcactctgcctccattaaaaattaaaaccaacaaggaaatcaacgccatactgaattgcgaaatccaaaagcgcgatgataagacctaatacaacggatacagcaataaccgctgtggtctgtcttacaagtgattgtttctccggccaaataatctttttgaattcagccgaaagaccggtaaaccagctctcttttggagccttgtctaacttctcggtttctcccattttttcactcctttgccacgcgcgtcttatttggtttctttgtgtaacgtatgggtcttgcagaatctgcaatactttttggtttccatcctgtcaggatgagcttttttgtcttttgtcatgttgtagttacggtttttgcattccgtacatgccaatgttatttttgtgcgcacaacttccacctccattaaaattctttgtgcttttttctgccccggtctccgtagtgagacgttttttaaggatcagcgacagtccttaaaaaaaggcataaaaaaaagacctacttccatcgcctgtctactatatcatatccacttgtttccgtcaatctttttttgtatattatacccttttaaacctttttgattattttttcctatttcacatttttttctcaaatggtataatatttttatatagttagaccgaaatacttttaaagaatctttaaaaatataattaaaatccccacatttatcatgccaggcggcaaggatgctgtcctataacctgataaatgtatatatttcatggaagaaaggaggggttttcttggctgctattgacagtgcctatcattattatttaagcacttatggcacttcgaaggtatcgcgttatgatacccataagaagagtcagcttcgtgctgtctataatcagattgtaaaaacaaataaagatactcctctgtataaaattccagattccacggatgtgaaaaaatttgcgattgacctgaaagaacatacccgttcgatccagaatgtaatcgctgccctttctgacaacgacgaggggattgaaaatgtattcaacaaaaaagttgcaaagtcttccgacgaatcttctgtcaatgttacctacattggtgaggatcagagtctcgataattctttgcattttgatgtggaggtaaaacagcttgcagccccacagatcaatgtcggaaagtttctttaccctgatgaatgcgatttcaaaacaggtacttacacattcgatatatcaactgatttaagttcatatgagtttcagtataccgtaagcagaaatgatgacaaccagcatattcttgaaaagcttgcacgcctggtcaattcttcaggtgccgggattcatgccgatcttgccaaaaatgccagtaacaagattgccctgcgtttaacttcaagtcagaccggtcttgcagacggtcagtcctatctgtttgaagttaccccaagttccgatcatgcatccgcaaaagcaatgcagacactcggtattgattgtgttacccagacagcgagtaattcttctttcttattaaacggtacggagcatgcatctctgtcaaatacttttactgtcaacaatgcttttgaactgacactgaataaaccaagctcccaggcaaaccctgtacagatcggctttaaaacaacagctgactccattgtagacaatgtccagtctctggtaaatgtatacaacaatctgatccagttaagctatcgctatgacagcacacaggaagcagataaactgcggcgcgattttacacaggtggtaaaaccttattacaatgaatttgagtcgtatggattaaaactttcagatgacggtgccatcaaggtcgatacacatcttctgacggatgcagttacttccgcggatgcaaaagaatgctttgcaacattaaataagtttaaaaacgatctcggaacgaccgccggaaccgtctctgttgacccgttaaattatgcaagcaaaacgatgatcacttacaaaaaaccaggtcataagaatttttcctgcccttacctgacctccgtttattccggaatgatgttagacagatattgctaaacggacacttacagcttttctgtagtgtccgtttaatattccaatatcccagatgcaacttcagattatgcatctttcgcactgatcatgtactatatatcattttcctgattttcattttcttctataatatccagcatcgtatttattctctctatataattgtgatgctcccttacttttcgataaccattttctgcgattgccagacgttcttcctcatgtgccagataatattctgctttttcacaaagatcattgattccgtcaaagcataccaggtcttccccctctttaaaataatatggtatttccgcctgataatttgtcatcagaaaaccgcctgccccaaggacatcccatacgcggagcggaataccgcttttaatatttggaattgtgaaattcaggttgatctttgacatatgaaaaacctgtggcagctcactccagtaatcaaccgaaccacagtactgaatccgcagcatatcacttacatcactgttactgtacacattgacatgataacgttttgacagttcgatcaatgcacgtctgcgctccacttccgcaattttaaatccaagtacggtcgtctgaaagatcagtccaaggtctgaaaaagatccttctgatttttccagttcaaaatattcctgcagtttttccaaaatatccgtagtcagcataggttccactatattggcaccgctaatgtttaactgtgcctcgatcacagcatcaaaatatccgcgcaggtattccggcagcctgctttttatcttatcataagagttccgttcataaagacttccgacaaacgcaatgtctcctttatatttctgtatttccggtgaatttgcaattaccgtatccatccggtccgtatccacggcaagtggcagataccagatatgttccactcccatctcccggaattccagatagtttgtcttatcaaaggtaaatatataattacacggatgaaaaatagactcatgatacatgctgatcagcggattatcacagctccaggatacatattttatccccattttctggcagacattcgagatcagtgcaaaataattgaccgtaaataccatatcatagtgcgtttcccgcagtttgttttcaatgattttttcaaattccggatcgatatcataattgccaagatgctgttcgatattatccaccgtatgccccagtaataaaaaagtctgctctatgtctctgtaattataagctttccagcgatacattaatatgtgcataataatctccattcctgtgccgtgtcagccaaaataacgttttcatctgtatgtaaaacctgttgcagggagggaatgagaacctccgctctacatccaggcttcccgtatccactccgctctgcttttccacgtatgatgctcttttgctgactgatatccacagtctgccatcctttgtgtggactgcatgtgtccgaacagatcaaatacacgttccggcagggtacggatctcatttcttgaaaacatcacaagctcttttccatccgtaaattctcttcgtagataagtggaatcatccgtcacaactgctgcccccgcaagcattccattaaaaatacggtcatgtgctccggctttaaaccaggtcatcgtattcaggacaatcttgctatcgttcatcagtggcaatatttccggcgcaagtacttttccaccatacaccagatacggattgtcactccactcacactgatcccagcctgttccatatgccgttacccgtattccgttttccaccagaatacggacagcctgttcacggaaaaatgacgtggcatacgagtcaataaaacgcatctgcacgatgatctcatgaatacgctgttctgaaatatcattccgcttatattttaaatattcttctatcacatcctctgttgtccggtcaggatgatgcaccagttctgacagcacagcctgtgccatctcctctccatcgacttccgggatggatgacagatccggtatcatcttcgcaactgtgtagatcggcaatgccccggcatataaaacatcaattccacgctccgcaagcggcttatgcctgctgccaagttccaccccggcatgtggcagaaaatccgtataccggatatttttaaaatatctgcggatataccggacatggttgcggtccgtgcacaacacaatagatgttgccggtgcattctgcagtggtttttcatagtgaaacggatgatccatcaggatattgatatatggaatattgtaagtttcccagagatttggctcttcttccgcagaacctgctctttttgatcctgctgtactttggaaaatgtcctgcttcaaaagcatccctgttccggtcatgcctgccggaagtgacagattatatcccaggttattaaacgtcacacagaaaaacctctgatctttttttgtaccttcttcgatgcattcgatcagcgcctgcttgctcacctcttcgagacgggcatcataggtaaaggaagcatatcccatggattcaaaggcatttttcagttcctgggtgaataagtcgagggtgtcgtagacaccggtgatgtaaatgatggttgtctgcatggtggtctcctgtactttttatagatttattttttctatactgcagctatgccttttataatcatcctttgtggaatctgtgctgtcgtaattgattccagcaagaatcacttgtccatgataatctttcaggctctgcatgtactgcttcttttttatctgtgcaatcgctgcatctgaggatttatcccattttaattccaccacgatcgccggcacatctctaaactttctcggaacaaacacgatatctgcaaatccctttcccacggcgagttcccgatacatcacataatcttttcttgcagcataatatgccagcgaaagcacacatgacatagagttttcatcattatactttaaaatggatatattttcctgatgcacctgctcgatcatttccgcaacatattcttcttttccatctatagttgcctgaagcagtgtttcagaattacgaatcgcatccatgaccggttcccatccgccatcctctatgcagttaataaactctttctgcacctcctggtttggaatagaaacagtcttgttctcaaaatcgtaggtcaggtatcccaaatgcactaaaagcgtaaatacatcatctacgctcgcaaatgtggacatatcattctgaaacttatccggattaatccttatatggctgcctgatataagctgtgtgattaacgccttcaagtgatacatgtccatctggatatatttttttagtgcctcataggtctccgtcttcgtccaataactgtcaaaatcatgtcccagcaatgacatgactactgatcttggattatagatctgaatgccctttaaatcatatccatcgtaccactgtttcatcctgtcataaggcataccatatgacacacacagactttgaacttcctcttccgtaaacccggtaaattcagcgagttccctttgattggtcatggaatattcatcaaacatattgagagctgaatgctcgccatactttttaataggcagtattcccgtcatataagccaacgcaatatatggcttatctttcatccacaggcgcaagaaatccagatattttttctgcgcttcatcatcccccggatactttcgaaatatgcaatcccactcgtcgataatgatgataaatttctgttttttctggctatagatgttctctaatacatcaataagatcttcccggtcaaaacagtctacatctccgtattcccgcctgatatcccacaaaagcctcttttgcaggtaatcgatcattccgtccactgtctgtgcacggttaagaaagtcaagcatattgacatgaaggacattatatttattcagatttgcctcaaaactttcatcctgtgcaatcttataatccgcaaacatgttttttgaatcacatcccttgctataataagctacaagcatatttgcagtcatagattttccaaaacggcgaggtctgcttacgcatatattctgatgttcggtattcagattctgattcatttcagaaatcaacatggttttatccacatatatcttggaattaagtgctttctgaaattcttcatttcccggatttaaatatattcccattctaatctccattctgcatttgaaaaattatatttttcactctgtttctctaataagctgactataataaatttaactgtttatcaatcttaaacgtttttttgccggctcataactaccgcacttctgataataatactttgcctcactgattttcccaaggcactcatagataacgccgacgttataataagccgcataagaatttactctcgccatccggcagtcccggtgccttaccgccttaaggaactctcccactgctgcatcaaacatagcgttgttcatataaatgagtcccatcaggaactgaaaatccgcactatttccaaattcttcgtaaatgttttcaaaaaaagtgcttccccggcgcgtccgctgttgatcagggcatagccgtaggtttccaccatatcgatgacatattctaactttggttcaaggtcataactgcgcccatgggcgaaccagaagcatgcctcgttataattttctgccatgtaatagctttttccaagctgatacaatagatacgggatctgctgctctttttttgcatccgtaatttcagatttctgctctgcatccgtatcctgctttgagagattctgttctaactgcgtggcatgcacttttgcatcccatcctaaattttttaattcctgctccaacagtcttatgttgcgcagcgcttttgcctttttttctttcttcggaagatcataacccgtatggccgatgaaaactggtgcttcgtatgtacgatattccttttcatcataggcggttacctgctcatggattcttcccgtgtaatgaaaactttcttttgcaaaaatacggttgatccactctttattttcctgctttccatcttttccggaaataatattgattctccggatcctgccaacctcacctggatgttcggcaatcattttctctaactgtacccgatcaatctgctgtaaatattcatcgctgtcaatgaccatcacatacggatgtgctgcttttgaaaccgcaaaattctttgctgccgaaaaatcatcgcaccatgggaaatcatagatattttccgtatattctgcggcgatttttttgtctgatctgtcgatccggtatctactacgaccagttcaaatccggtgttctggaatgatttcaggcagcgtgccagattgtgttcttcatttttggtgatgatgcagactgataacatgtggttgttctcctgtgtgccgatcgctatattggtgggcatattcactcctccctgtctgtcccaatcaaaacttttttgccttcaaatgcaaatccataatgatatatctgttcctttctgattcctttatcaagcaggtctgcatcgtattttttctcacagatctgctttaaggcagacagaactgtctcttgaatacttttttcctttcgtggatttcgaactttgaattctaaaataactgctttgcattcctttgaatttttcggttctaacattacatcatatctgccaaacccactttcacggttggatttaaggtaatatctatcccgcaggtcaacaagcagacctaatataaaaccatggtaaaaacgctcaggctctgccccagattccctctctccggtgtcgaaataactaaatgtctgtataacaattcgattcatgtattcattcatcgcatccacatcaccaagtaacattgcccttacaaaatcattgtaatctggttgtacaggagcaaaccagtcatgtaccataccctgaaacattaactttacttccagattcgtcaacgcaagctggtatttcggcatcttcccctcctcaatatcctgatacgtttcataagataatactttcaaatatccactcgccagcaaaagactccaaactgctttttcatttccatttaattgattgtatacaatctgctcttcaatttctgaccagatgtattctccgcacaataatttttcaaatttttccttaattgtacggtttccttcctgaatcaattttcctactagactatttgcacttgtatttgcccaaaatgttttgtataactgtgtatcgagataatttaaaattgaccatggattataaatatctttgtgttccccaaaaatgaaaccatcgtaccatctttttacctcttttttttctttctcaagaccatactgttccaatgcatcaaagacttccttctctgtaaaaccaaatacagaagcatattcatttgatgtagtcgtaactatctttaagttattcaaatctgaaaaaacggattccttacttactcttgtgattcccgtcataattccacgttccagtgccggattcgtcttaaatgtcgaattaaacaggcttcgggtgaatgcgacaagttcatcccagtaaccatccacaaatgcttcctgcatgggtgtatcatattcgtctaacaaaatgataactttttttccataatatctatacaggaaatctgataactgatataaagaagatgtcgcatccgtctcttttatattttcctccaacatacgctcataatatgctctgtcggcatctgtaagcttttcactatctttaatataacaaaactttatatatatgtttcttaacacctcacacatcttttgtt

SEQ ID NO: 5150 - DNA, 138398 bp, Unknown
  gut microbiota DNA sequence
ttttcttgctgccatttcttcgtctgaaactgcaatctctaatttcatctccggaatattgatacggatgatatcgccctcttccacaagtgcgattggtccgccgactgctgcctccggtgaaacatgtccgatggaagccccacggctcgcgccggaaaaacgtccgtccgtgatcagtgctaccgatgaaccaagtcccatacctgcgattgcagaagtaggatttaacatttcacgcataccaggtccgccttttggtccctcgtaacggatgacaaccacatcaccggcaacgatcttgccgcctttgatcgctgcgatcgcatcttcctcacagtcaaagactctcgccggtccctcatgaaccatcatctcgtcacagacagcggaacgtttgacaacacttccgtccggcgcaagatttccttttaatacggcaagaccacccgtcttactgtatggattgtcaaccggtcggatcacttccggattcttgtttaccgcatttgcgatattttctccgacggtctttcctgtcacggtcatgcagtccgtatttaataatccgatgtccgcaagttctttcatcacagcatagacaccgcccgcctcatttaagtcctccatataagtaggacctgccggtgcaagatggcagagattcggggtcttctcactgatcgggtttgcaaatgcgatatcaaaatcaaatccgatctcatgtgcgattgccggaagatgtaacatactgtttgtggaacagcccagtgccatatctacagtcaatgcgtttaagatggcatcttttgtcatgatatctcttggacggatatttttgcggtacatatccataactgccatacctgcatgttttgcaagtttgattctctctgaataaactgccgggatcgttccgtttccgcgaagtcccataccgagtgcctctgtcagacagttcatggagtttgcggtgtacataccggagcaggaaccgcaggtcggacatactttttcctcatattctctcacatcatcctcggtcatggttcctgctgcataggagccgactgcctcaaacatggaggataaacttctctttttgccctgaacgtgtccggcaagcatcggtccgccggatacaaatacagtcggtacattgatacgtgctgctgccattaaaagccccggtacattcttatcacagtttggcaccatgacaagtgcatcaaactgatgtgcgagtgccatacactcggtggaatccgcgatcagatctcttgtaacaagggaatatttcattccgatgtgtcccatcgcgattccgtcacagactgcgatcgccggaaataccaccggtacaccgcctgcttctgccacacctaattttactgcatttacgattttatcaagattcatatgacccggtacgatctcattgtaggagcttacgataccgaccatcggtttattcatttcttcttccgtgaagcctaatgcattaaaaagacttctgtgaggtgcctgctgcatccctttttttacattatcgcttttcatgttaaatcaaatctcccattctaatatctatattaaattcgttcgcagatcagatctcccatctgtgcggtgccgacctgtgtcactgcgtttcgtttatcttcttcctgcggcatgatgtcgatggtgcggtaaccgtctttcaacacctgttttacggctgcctcgatggcatctgcctctttgtcaaggtcaaaggtatagcggagcatcattgctgcgcttaagatcgtcgcgatcgggtttgcgataccttttcctgcgatatccggtgctgaaccgccgctcggctcatagagaccgaacttcgtgtcgtttaagctggcgcttgacaacattccgatggaacctgttaccatgctcgcctcatcggataagatatcaccaaacatattttccgttaaaataacatcaaactgtttcggatctttgactagctgcattgcacagttgtcaactaacatgtgctcgtaggtaacttccgggtaatcctttgccacttcctcgaccactttacgccaaagtcttgaggaatccagcacgtttgccttgtccacgctcgtcacttttttgcggcgtttcatggcaatgtcaaatcctctctttgcgatcctgcggatctctgtctcgctgtatgtcagggtatctgtcgcagtcatcacaccgtcaacttcctcggtttttcgcgcaccgaagtataatcctccggtcagctcacgcatgatcatcatatcaaatccatccccaataatatcatcgcggagcggacatgcctcttttaattcttcatataagtaagccggtcttaaatttgcaaataaattcagagactttcttaattttaataatcctgcctccggtctcaattccggtgctaatttataccacggagaggtcgctgtattaccgccgatggaacccataagcactgcatcggacgcttttgctgctgcgattgcctcatctgttaacggcacgcctgtcgcatcaatcgaacagccgcccatcaaaatcgcttcatatagaaaactgtgaccatactttgttccgatcttgtctaatactttttttgcctctgccacgatctccggtccgattccgtcaccggaaatcacgccaatcttacattccatgctctaatccctctttcttttcccctgtcagatatgtgtaactgatttttcggctgccagaaagtatcctgcttttctgcaccatagaatgcatactctgtgaacctcctgctttgttatgaataaaaagaaaatcagcggctgctgtgtgcccgcactttatcacattactaacagacagtatgtataatgtctataataatgtaatttgggaaacattgcaacctctgattctatttttcttttttataatatttataactgggtattatgaaagagctttcttttcattacctggttgtataccatggtatagcttaagcgctcattacggataacagactgcggaagattccatctttctggatcagttcatcataattgccgcgttcgatgatggcgcctttggaaaataccagaatttcatcatattgttttaagctgtctgcttttaactggtgtacgatatttaagatggtcgtgtctgactgcaggacggtctgttcgatttttgctgccatgaggctgtcaagactggatgtcgcttcgtctaagatcatgacaggagtattgcggaggaatgccctggctatggcaatgcgctgtttttctccgccggagagattggaaccggattcctgtatggtaaaatcaagtcccttttcgttcaggtagtctcccataccggcacggattaatgcctgtttgatgttctcatccgaatagctttcataaagggaaacattgtcccgcagtgtgccgtctaacacgacgacattctgatgaatgagtgcaatgctgcggtagagttccttcttctggatatcgctgatgctctggctgccaaaacggatctctccttcaaaatggttataataatgcatcagcacatacataaaggtactctttccacttccgctgtttccgacgatcgcatattttttgccaggttcaaaagttacgcttaaattatgtaagacctcttcgccctcctcgtaggaaaaacgtagattttccactgagattggcagtgctgtttttaacttttccccatggtctgcatctttcggcaggtttaagatatccgtcacccgctttaaaaccggctggcttgtcttatagtctgcaagcagttttgagatccactggatcggtgtctggatatagttcataagctgtatggttgcgatcaggataccgaccgtaacgtaaccttttaaaactaaaatcccggcaattcccatcatgcacacatcgatcaggaaaccgaccccgccggagatgcttcttgacatgttctgcgtattgcgaacggaaaaatgcgtcctttccacttcccagttacatttttcataatcggtaaggatctcccgctccacatgatagctcttgatgacctcatagccgttccagatgtttttcagttttccgttgtaccagtcaagcacatggatgtatgatttctggcgcgctgaaatctgttttccaaacaaaaacggcacgattaacggcaccgcacagagcagaatcgccgaaaatgccagccacggttccatctggtacaacgtgaccgtcgcgatcagaaatgtgaggatctggatcacaatgtttggcagacacagaaaatatttttcatcgagcataccgatatcattgtttaagatcgatgtatactccgcgctcttgtgcagacggtaactgtcgagatccgtgctcacaatacttttacagatgtcttgtctcacatccactaagactttctgtgaaaacttcatctcaaaataggagccgacatagccgaatgctgcataacagacaacgatcaccacccctgcaatgctcgtatgtaacattttttgtgcatccatggcggacactgcgtcgatcattttctgcatatagagtgcaaataaaactgcggctatggtttttaggacagcgaaaaatacccacgccataaggtgtactttgtgctttttgaaatattcattcattgttattctccttgcagtccatatttacttgcaaatatttttcgcacatctctataacatgatttccattaatattttttattctatcatagaccatttttgctatttggtattcatttttttcaattaatattgtaaataattgaagaagctgctcctcatccaatttattaatgtattttcttgcttgtactaacttatagttatatgaacataaaatattctcagactctatcgttccatttaatgtgaaccgcgaatttgagcatccacccaaacacatatccccatacttgcactcacgacacagccctttcaaatcatctcttttaaaatttctattccacaaaaatgaatccttagaaaaccatatatctcgcaatgatccatctctgatatttccctctatcattttctcatttctaatagaagtacatccaacaatatctccattttgtaaaataccaactgatttttttcctgccgaacatcctgcccaacaagtattctgttgcatacaaatttgttttttgttgtaatagcctattccatctgtcagatgtatctctaattgtccttctttctttttatacgcaaaatcaattatttgttcaatcatccctggttcaacaaataatgtttgttgtttaaggaaattacccattggaagtgtgatctgtagctgccagaaatcaacccctatctccgaaaagatatcatacatttcgtctaattcttcaatattttcattgttgatagtagtggctaccattgtctgtacaccatgatattttaatttttttaacgccaataaatctttttcaaaagatccctcttttcttattctatcatgagtctcttttacaccatcaatacttattgcacaaattgcaattccagcctgttttattttttctactaaatcatcctccacaaaccacccattagaaattatgtttgtgtaaattccagctttacttaatttttccgcaatcacataccaatctttttttgtagttggttctcctcctgtaagtgtaacaaattttactcccatattctaaatctctcatggcattccttcctttcatattttatatatcaacacttaataagtgctaataacttttttactgtaaatcacctgttgcaaaaagaccatgtcaaaaccggaaaaaaattttttctggttttgacatggtctttttataatatctataacataatatatttaaaatctcagatatgaggtacatacatatgaaaaaaatattacattcctttctcttaatattatgtctcttcacaataaataccaatcattctttttctttgattgttaattcctacacgcttatcgctgacaagagctaccctatcatcgatacctatagcttggattattctatcttctccccaaacattgtttcataaagatcagaaaacacctttttatctaattcaccacttgctgcggcgcttacaaaatatgcctgcttatactttttacggcaatattctgccttttcttctccctccattccactttcaatcatctcattcatattccatgccatttcccctaaaacaaatgtcattatcggtgcatttgcatattttctcacttttggcaaaatatattcacacaattccatggaataccgatagtttccaactgccccataatactttgaaagatttgcagcaatactaagttcttcgatctcccattctgccatatatccttcccgcaggctgcgcagcagcatttcacagatttttatacttttaggatactcatctattctgccatatgccacagccagccgctttaaaagtgtaatctcctgttcccggaaaggatatatcacatcactgtcaagaaattttttatactgtggtacaacttcttctgcaagctcttctaatgcttccacaagctgttctgctgtaatgcgctgcatataataatccaaaaaagtactttcccggcggatatatctttgtgtagatgcgtcttttccaacaagttttttcatctgctccatataaaagtctgctttttcaaaatcatgctttgccatagcatcctcaaaatattctctttcctgtatcagttccatatccctgctgacacacactgcataatttttttctgtgatctggtacattttctccataagttgccgatatgtatcacttttcactttatgttttccgttttcaattctggaaagtgtttctacagaacagacaccctcacttaattcttcctgtgtcattttctttgcaattcttgaaagccgtatcatatcaccaacattataatttcccatatggcacctctttctacactctgtcacccgtcgtttttattttttgcaccagttccacattgttcatgacaagtgccgtataataagccatcgtaagttccacctgacattgtttttgatattcctgctgcatgtccttgtttctctgcatcagctcttttaacagtcctgccttcttaaaatgcaattctgccagtccacgcatcgttctgctttcttttacaagtgttaacgcctgttcaatgtattccagttccttttgtgcatctcctttttcttcctgtatgctggcaagttctttcagaatggacatttcagcctgttccttgatttttttcgaatcatactttcttgtaaaaagcagcattcttttcaattctgcctctttccatgaaatatcttccgaaaactgaatcagccccaaaaaaagttttatctccatttcactgtataaatcagaagtattttttttctttccaaaaaaaggttttgtcaaaagtatcgcctcatttaatacagccttgatttcttcttttgatgcaccacgtttctgtaacagttctgcctttccccagagataatattgttcatgaagcacttgtttttttggcattacactttgataactctgtaacagtttctccgctgtatccagatttttctcttctaaattccgatggatatcttttcgtaaccggaacaagttgtaatctttctcattcaataacaattcaaattcaagaacctgctttcctattcttgacaacaatgtcgcactgactaatgaatccacctcacgatatccctcttcaatccggaacatcgttgctggtgaacaaattccttcacaaacctgtgtcatggacaatccatacttctcccgataatacgacaatgcaatccctaccgtatttaatttcatcttctgcccctctaaaacttttctgtcaggcagcagaatataaattccataaatattctactcctataaagaaaaacctgttatgttttctcatccacacataacaggctttctggtactacacttatttctccattgcttcttccggtttctccactgcggaaattgcagctttctgcatcgggatacggcagttcttgttgttgccgaactcaacgatcacggtatcatctgcgatatcgatcacggtgccgtaaaacccgcttgttgtcagtacggtatcaccgactgcaagttcggacagcattgcatttttcttctttgcttctttctgctgcggacggatcatgaaaaagtacatgaaaccaaataaaactactaaccagataatcataccgccccagcctgctgctgtggatgcggatgaagtggatgctaaaattgacatcttctcagttcctcctaaatttaatagacattacaatatataatacacaaaatgggctttttagacaagcactttaccaaattttatgattaatttatttttagccgttctgtttttctttctcgcggttgatctgtcccataccgtacagcttttcttccttataagaatggaatctgccctcgtcgatagcatcgcggatctcttccatcatcgtattatagaaatacagattatggagcacgcagagtctcatgccaagcatttcttttgcttttaacaggtggcgcacatatgccctgctgtaacggcggcaggtcggacagccgcagccttcctcgatcgggcgcatgtctttttcatatttctgattaaaaagattgatctttccctgattggtgtatacatgaccgtgacgtccgtttctggtcggatatacgcagtcaaagaaatcaacgccgcgctctaccccctctaaaatatttgccggggtgccgactcccatcagataggttggtttgtgaagtggcagatacggaacggtttcatctaaaatatgatacatttcctcatgcgtctcgccgaccgcaagtccaccgactgcatagccgtctaaatccagttctgaaatacgttttgcatgatcaatacggatatcagaatagatagccccctggttgattccaaataacatctgatgacggttgaccgttccctcctcggcattcaactgctgcattttggttttgcatcgctctaaccatctggttgtccgtgccacggaagcctccacatagctgcggtctgcaagtgccggggcacattcatcaaatgccatcgcgatcgtggaaccgaggttcgactggatctgcatgctctcttccggtcccatgaaaatctttgcaccatcaatgtgggaatggaaatagacgccctcctctttgatcttgcgcagtccagcaagggagaatacctgaaatccgccggaatctgtgaggattggacggttccatgacatgaatttatggagtccgccaacttcgcggatcagtttgtccccggtgcggacgtgcagatgataggtattggaaagttccacctggcatttgatctgctctaagtcctcggtggatacggcgcctttgatggcggcaacggtgccgacattcatgaataccggggtctgtatgtcaccgtggacggtatgtaggattccgcgtttggcgcggccttcctgttttagtagttcgtacattgtttataatctccttttttctttatatgaaatgggggcgaaactctggtaaaggctgtgagcgcatggaaagctttccatgcgaatttactgttttggagagcttcgctttggctgtctttacatatttcacatatgtttacaggataattgatccaataaatcaaagtagttctcgaaggttttacggcagcaggatgggttgtctatcacgattccatccactttcaatcctagaagggcaaatgacatggcaacgcggtggtcttcataggttgacacaatgccggggaacggagtgcctggttttattgtgatggcatccggctcttcggtacatgtgattccacgtttggtcagttcctctgacatggcatggagacggtcacattcctgtccacggatatgtccgatgtgggtgatatgcacgtcggaattgcagaacggtgcgattgcagcaagcgtcagcgcctgatctgaaaaatcgttcatatcgatctcgattccttttaaggtatcttcagccggtccggtcacttcaatcccgtctgctttttctgtgacggtacagcccatccgcgcaagcacatccagaaatttcatatcgccctggctgttgtccttgtgtacatgttttacaagtgccctgccgcctgtgatcgcagctgccgcataaaaataacacgctgccgaaacatccggttcgatctgataatgttttttctggtagacggcattcggatcgatccgataattttttccgtcatattttacttccacacccgcgtccgctaacatttttcttgtgatgcggatataggaaccgtctgttttctcacttgtaatgtggatgtctaatccctgcggtatcatcggtgagataagcaaaagtgcactcaaaaactgagtgcttttgctgatgtcaaggggcaactgcagtgggtttccatctgcctttgactgatctgcgccggcttttggatttctccgtccacaaatcttcaccggcagatgcccttctgtttccagataagtgatattcgcaccaactccggtgagcagtgaaaataactcctgcatcggtctttttttcatctgctctgaagcttcaatcgtatattccccgtcggaaaaaccaagcattgccgtcagaaaacgggcggctgtcccggcacttccgacattgatcactgcctgtttcttgggaatatttccaccacaacctaaaacagtaaccgccttttccgactcattgatatctaccataaaccccaaagataccagactctccagaaaatgccttgagtcatcagaaaacagcactccttctaacttcacttcaccatccgataaagctgccatcaaaagtgcacggtttgtcatgctcttagatcccggcacatccaccgtccagtcgaccggtctatctaatctttttacctcatattgttccttcatatattttcatccctgttatcagttttcctgcctctaaacgcttttcccattttaacatattcctgttgtcacgaaaagagaaatcttttataatgattaagatatataatcttataatacacattttcaggaggaatatttcatggctggttcatcattcggtacaatttttaaaattacaacatggggcgaatcccacgggaagggactcggcgttgtggtggatggatgtcctgccggactgcctcttgatgaaaatgacattcagaaatttttaaaccgcaggaaaccgggtcagtcaaagtttaccaccccgcggaaagaagatgacgcagtcgagattttatccggcgtgtttgagggaaaaacaaccggtacgccgatctctcttgtcgtgtacaatcagaaccagaaatccaaagattacagtgagattgcgtcctattaccgtccgggacatgcggactatactttcgaccagaaatacggtttccgcgattaccgcggcggcggacgttcctccgggcgcgagacgatcggacgtgttgcagccggcgcaatcgctgtcaaaatattaaaccagctcggcatcacatttttgacttacacccgttccatcggaccgatcagtatttcatcacagaattttgatgccgcacagatcaatgaaaatccgctctacatgccggatgccgacgctgcggaaaacgcagaaaattatttaaatgcctgcatcgccgaacagaattcctccggtggtgttgtggaatgtatcatccagggtgttcccgccggacttggcgatcctgtctttgaaaaattaaatgcgaatctcgcaaaagcagtcatgtcgatcggtgcagtaaaaggttttgagatcggtgacggatttgacgttgcgaaagcaaccggaaaaaacaataacgacgccttccgcatcggcgctgacggcaggccggtcaaaacgaccaaccatgccggaggtattttaggcggaatgagcgacggaagtgacattatcctgcgcgccgcgatcaaacctacaccatccatcgctgccccccagcagactgtcaataaagatggggaagaaattgatgtgagcatcaaaggccgccatgatccaatcatcgttccacgcgccgtggtcgttgtggagtccatggctgctgtaactcttgtggatgccctttttacaaatatgagcgcaaggatggattctcttgaaatgttttatcaacactaatactttataattcataggacgtaatttcctatgaagattcgggtgtcaaaaggtggctcacaacttagctgctggcaaattgcacaaagccgggactgtttttgtgactttgggagaaaattagaaaatcttagtatgcctgtctatttacagtaatgttctgccacggacggcagaacaaggcttcacgagccatggaaggctcgttgaatgccgtttacgtcactctgtgaaaaactgattcaggcatacttagtttttcttattctcggacaacggaacaaaacaagttcggttttgtgcaatttgacagacccaaaattgaaaaccaccttttgacacccgaatcctatgaatcctatgaattataaaatgccgtccattcctggtcggcattttttgttattcttatgtaagtaaactaagtatcatctgggcagtctctgtcagtcccgtcccgttatccatacttctcttttgcatatagcgatgagcttcctcctctgtcaggttgttacgttccatcaggagtgcttttgcttcactgatcagattcatctcttcctccgaccgctccttcggtttttgtcttgcctttttccgcctgcgcgtgatcatgtattccatcatttcaacggtctggagcagttcattgatctttagcggcgtcgataaacagaccagattttccacatcacgctcaccacagtttcccggtgatgccacgagcagcatttcaaactgaggggggagatattcatgtaattccgtatacatcatatccacaaaacggtaaccacataccatgatccctccgtccagttcatttgcattctgtaaagcctgggcgcctgtcgtgcagacggcatccacatgatgaccgttctgcatcaggatctttttgatattacgcgcagtatcctgtttcggaaatgcaacgataatgtttgtcaaatcttttccccttcattcctatatcagattttatacaggtaattattgatctcccaatcggaaacctgcgcacgataatctgcccattccgattttttggcctcaatatatttttccgtcgcgtgtctgcccagcacgttctgtaaatattcgtctttttcaaattctgcaagtgcctctccaaggtcagccggaagttcctcgataccgagtttatttttctgtgacatacgcatctcaaaaacattttccgtcactgctgccggcggctcaatctgattccggataccatcaagtcctgcctgtaagcacaccgcaagtgtcagatacggattggctgcggaatccggacatctgagttccacccttgtaccctcgcctcttgtaaccggaatacggatgagtgggctgcggtttgtcacagaccatgcaatatagattggtgcctcatatcccggaaccagacgcttataggaattgacaagcggattggtaatcgccgccattcctttcatatgtttcatcagaccgccgataaaccagtatgcttctttgctgagtcctaactcgccgtccggatcgtcaaaaatattttttccgtccttgcagagtgacatattcacatgcataccggaaccgttgattccaaatttcggctttggcataaaacttgcaaacattccatgacgttttgcgatcgttttgacagccagtttaaatgtcatgatattgtctgctgttttgaccgcctcatcataacggaaatcgatctcatgctgtgccggtgcaacctcatgatgggaagcttcaatctcatatcccatatcctctaacgtcagcaccatatcacgtctcgcattttcacccagatcgatcggtccaagatcaaaatatccggcacgctccgtgctgatcgtggtcggctgcccatcctcatcctgattaaacaggaaaaattcacattccggtccgacatcaaaacgatatcccatctgcgttgcatcttccactgccttctttaagatataacgtggatcaccctcaaaaggttttctgtccgatgtataaacatcacagatgatccttgcaacctttccctgctgcggacgccacgggaaaattacaaacgtgtcaagatccggatacagatacatatccgactcctcgatacggacaaatccctcaatggacgaaccgtcaaacatacattcattacttaatgctttctctaactgactggacgtgatcgccacattctttaaagttccaaacatatccgtaaactgcagacggataaattccacatcctcttcctctaccatattaaaaatatcctgtttcgtatacctgctcatcaaaaatcactccttcttcatatactgcaacactttatcgtaagccatcggccctccaaataaatcgagtgcgcttccaatggtcacattcaatctgttattccccagtttcttcagttccaaaaggtcttcaaaactgccaacgcccccggcataagtgaccggtatctttccccattcgccgagcatctttaccagttccttttcaatcccttttgcttttccttcgacatccacagcatggatcaagaattcatcacaataggatgaaagttcgtccaatagtacggtgctgacctcttcatctgtaaactcctgccatcggtctgtcactatataataggtatcttctttttttctgcagcttaaatcaagcactaaacgctcccgtcccactgcagcatttaagcgttttaaattatcataattgatctttccatcccggaacacatacgaagtaacgatcacatgactcgctccggcatccagaaactcttttgcattttccgctgtaactccaccaccgatctgaagtccgccgggatatgcccgcagtgcatgttctgcctgttcacgcgtcgctttgtaatactcactgctcaccggattcaaaagaataatatgccctcctttgattccttctttctgatacagctttgcaaaataagcggcatcctgctccgccacaaaattctccgctgcctggtctccggcatcctttaaacttccaccaacgatctgtttaacttttccgttatggatgtcgatacagggacgaaactccataattttccccctttttcttctcttcttttttcacagaataacatattttatctgtgatgttctcttttatttaggtaaaaaatgggcgacgtatgcccgtgctctggccccgtcgcctaaagccatcatatcacacatcaaatcatttgtgaaccataatttctataaggttttttcacacgttttattattacttctaatatatatctattttttataaattcacacttatattacattgacagagtattttttttttgctatgatacagaaactaatatatctttttcatacaattcaatacgaagaaagtgaggaaaataaaatgggaacaattattggtgaaggtattacttttgatgatgtgttattagttccacagtattcagaagttacaccaaacatgattgatctgacaacgcatcttaccaaaaaggtcgttttaaatattcctatgatgagcgctgccatggataccgttacagaacacagaatggccattgcaatggcaagacagggcggtatcggtattatccacaaaaacatgtcgatccaggcacaggccgatgaggtagataaggtaaagcgttctgaaaatggcgttatcacggatccattttacctttccccggatcatacattacaggatgccgaagatctgatgcgcaaattccgcatctccggtgtgccgatctgcgaaggtggcaaattagtcggtatcatcacaaaccgtgatttaaaattcgagacagattttaccaaaaagatcagtgaaagcatgacttccgagaatctgatcacagctccggagggcatcactttagaggaagcaaaaaagatcctcgcaaaagcaagaaaagaaaaacttccgatcgtagataaggatttccacttaaaaggactgatcacgatcaaagatattgaaaaacagatcaaatatccgctctctgccaaagacgagttaggccgtctgctctgcggtgccggtgtcggtatcacaggaaacatgatggaacgtgtagaagctttagtaaaagcgcacgtcgatgtgatcgttgttgactctgcacatggacattccaaaaatatattagaggcagtcaacaagatcaaaactgcctacccggatctgcaggtcatcgcaggaaatgttgctaccggtgatgcaacacgcgatctgatcaaagcaggtgctgacgcagtcaaagtcggtatcggacctggttctatctgtaccacccgtatcgttgcaggtatcggtgttcctcaggtttccgctatcatggactgctacaacgctgcaaaagagttcggtgttccgatcattgcagatggtggtatcaaatattccggagacatgacaaaagctctcgctgccggtgccaatgtatgtatgatgggcagcatgtttgcaggatgtgacgaagctccgggtacttttgaactgtatcagggaagaaaatacaaagtataccgcggtatgggatctcttgcagccatggaaaacggcagtaaagaccgttacttccaggaaggagcaaagaaacttgttccggaaggcgttgaaggacgtgttgcatacaaaggttccgtggaagacactgtattccagttagtcggcggtatccgttccggtatgggttactgtggctgcccgaccatcgaggacttaaaagagaagagcaaattcgttaagatctccgcagcagctctccgtgagagtcatccacatgacattcacatcaccaaagaggctccgaattacagtattgacgaataatcctctttccgatataatatatggtaaattttaaacattccggtgctatttttgttatagtgccggaaaattttatattttaatgaggtgaaatttcgtggacgcaagtgccatatcacagattatttttctaattattttattaattttctctgcttttttttcatccgcagagacggctcttacgaccgtaaataaaatccggatgcgtacactcgcagatgacggaaacaaacgcgccgaacgggtacttcgtattacagacgactcccacaagatgctcagtgcgatcttaatcggcaacaacatcgttaatctctccgcctcctcactggcaaccacgcttgcaatcaagctctggggcagcgtcggcgcaggtattgcaaccggtatccttacgtttctgatcctcgtctttggtgagatttctccaaaaacttttgcgacactttatgcggatcagatttcgatcgcctattccggtattatcggttttcttatgaaaatactgactcctgtgatttttctggtaaatcagttttccatgggctttttatttttactgcatatggatccaaaggcaaacaacaatcagatgacagaggaagaactccgtaccatcgtggatgtcagcaaagaaaacggtgtcatcgaatcagaagaacatgagatgatcaacaatctgtttgattttggtgatgcgcaggcaaaggaagttatgattccaagacctgatatgacttttgcaaatgtaaataatacttatgacgaactgattgatatttttcaggaagacaaatttaccagacttcctgtctatgaggatacgaccgataacgtcatcggtatcctgaacatgaaagatcttctcctctgcaaggacaaggagcatttttccgtgcgggatatcatgcgtgaaccttattttacttttgagcacaaaaataccgcagaactttttattgagatgcgtaagtcatctatctcccttgcaatcgtactcgacgagtacggtgcaactgccggtcttatcacgcttgaggatctcttagaggagatcgtgggtgagatccgtgatgaatacgacacggatgaagaagatccgatcctgccgcttaatgaccgcgaatttatcgtttccggttccaccaatctgcaggatctctgcgatgagttagatcttaatttcagttccgaagattatgatacgatcggcggatatctgctcggtctcttagatcatctgccggaaaaaaatgagatcatcatcacagatgacaatgtgcttctccgcgtcgaacagatggataaaaaccggattgagaaagtctacataaaaaaacccgattttccaccggatgaatcagacaaacaataaacaatagaaagaaacggatataaaaataccggcctgcagcctcagattttatctgattttgcaagccggtattttttatccttcttatttcggtttttattcaatatcgcacagatcgcttcctgcctcagaacggaaccggaatgtatcctctactccatgataggaaatggaaaaacttccctccatatccagataggaatgtgctgctgcaaccgcatctaaaaattctgcgatattttccagaaaaccttctgcacattccggtgaactgcacgcttcttcctctaccttttcgtcaatatacagacgaagcgtaaaatcatccatgtcgctctcattgtccacttccgctttctgtaaataggaattggtgcaattcttaaacagattgcttacataagatgccgtagaagaaatccgtgactgcgaaatatcctccgcctctaaatatatcttgtaactgatttttaaactgttgtctgccattttctctttctcccgttttttatttatacttatatcgcattttgtaaaatggatcggtatatctttgttatttctttgtagtgactgcttttaccttagaccagcccgaatagatcttttttgattttccattcacttttacagtcttataggtgcggacgcgtatgtaatatttcttttttgcttttaattttgaaacgtccagttttacctttttggtattattgacgttctttgccacaaccgactttttgaatttcgcatccactgcatactggatctggtaaccgcttgtctgttttgcctgcttcttccaggacaccgaaaatgcttttttctttgcctttacactggaaatggcggttcctttcggtatgatctgaaatgttttctggtattttccggtgtaatcacctttcatttcaatcgtgaccgtatagataccggcatttttccgcccggacggcttctttattttataatccgttccctcttttaacttctttccagcactgtttgtcacttttaccgccggcatatgggacttaccgtcataggtataggaagtctttgagagctggaccatctttactttcggaagggttcgtaccgtttccgtctttccacagacgctgcatttccgtttcacttttccgctctctctgtactcactccacttatgaccggctgccggaattactttctgtgccacaagcactgttttacacacactgcaatgacttccttccgtaagaccggtcgtctcacaggctgctgctaccgctgcatcttttaccggtgtatgccctgttgccggaatcactgtctgttctgtcaatatttccccacagacactgcagtggcttccctctgtgagaccggtcgtctcacaggctgctgctaccgctgcatctgtcacaattgtatgaccttctatcgggatttttccaggatctgtctgcgtagctccactatctaatgtacataccggcaaatacccctcccaataatcttcttctgtatgacatgttttcgaccagctgctgtatgtatcataaaactcatcacttttcacaaaaaaattataataataaccatcactctggtcatcccatgtacaatccacattataccaggagctacatatttttactttattccattcatggttggaactcgtcaccaccgccgtatcgattcctgagccattgcacatcattgcaaatgactgggcatatccggcacagacagtcttatccgtacagaaaacgctgtacacagactgtgaatattctgtactctccgttgcaaaatcgctattcacaagagcctgattataatacactttttcacagatcagatcatgtatctttttaaccttttcataatctttactgcattgatcgatctgctcctgccaggcatccacctgtttctttactttttccgtcttttccatccggtctgtaccgttttcaaacgcaggataaataccgaataccagagaaattgtatcatttgaatatgaaattgtataaactgtcgcattcaaaaaataatattgtggatttgaataccgaaacatcaacagtacatttttctgctgtgccttcgcaagtgtgcttccagaaattgcctgcatccgatatgcccccgactttgtcgtcacagcatccgtttccgtcgtcaggtacttttcacagatgacatctaaggcattccagtacgctttttcttcgtccgataactgatcataaaagtaatcgcttccatacttgttccagtcgtccgctgctatgtctgccgttcgaagcaaagactgttcggcaatatcactttcttctatggattcataatcctcgtcagccgcctcttcggtttcttcctcaaataaaagccgtcctgtcggcaattccatatccgttaggacttcatccgcataaatgctgttgtttttttctgaaaatgcaaatatcagactgcaaaaaattaccgtcaatatttctatttttaattttgctcttttcataacatccttatccttacctgccgctcatttatcagtcacaatcttcttccctgattttaagaaaactgttcatttttcatggcactttatgtccattataccttcccgctcgtcatcaaacaagtcttatccaccatatcctttgtatttttccccgatcttttctgtcaggattctgcgatcagttccgaaagcggtgcaaatgtatatcccatctcctcccatttggtcaaaagttcatctaagatctccccattcgtctttgaagtgctgtgcagcaaaacgattgctcccggatggatcctggtcagcagtttatcaaatgcttcctccttcgtcggctggttatcgacattccagtccacataggcaaggctccagaaaaatgtattgtatccgagttcttttgccatctttagattttccgtgctgtattttccctgtggcggacggtaatatttgatcatttctttgcccgtgatcgactggtataacgatgcgacatcatcgatttccttttggaatgaagccagctccgatatggatgacatatccgggtgatgataagtatgattgccaacggcatgcccctcttccgtcatgcgctttacgatatccggcgctgactcaaggaaatgtcccacgacaaaaaaggtcgcttttgcattgtgtttctttaatgcatccaggatcggttctgtatttccattttcatacccgcagtcaaaggtcagataaatcgtctttttatttttatcgcccacataccatgcgttgtatttttttaattcatccgctgtcacattgccggtcggctgggttccctccgctccaaagcccagtccccagttatctgcctgattctggacagacactgcctccactgtttttttcatctgctgtttctgcagcgaacctgcgccccagcctaaaaagaacataaaaacaaacagtgccgtcacttttaaaattttctttttgttatggttcatgtttttcccttccatcccgattattgatattgcataacgtctacgcatcgcaatcatgcatgaatgctatactttacaatatttctttttgtattctatgtgggaaggcgcatgtaccatgcccggaaatattgatccggaaaatctgttacaaaaaaagtactgtatactgacatttttatttttgtcacatacaatacttttcttatctgtattcttttaaaaattctctgctcagactgcaatgcaaatcttttctttgcccttactcatagcgcaatgcatcgatgacttccatctttgaagccttgttcgccggataatatccgaaaaatacaccggtcagcatagagaagaacagtgaaagcatgatcgccgttacagaaggatgcaccgtcataataatataatttgcatactgagagtacatattctgaatgacaaatcctgccacttttccaagcagtgccccgattcctataccaatcagtataccgatgatacctccgatcagacaaagcatgatcgcctctatgacaaactgcatacggatggtacgtcttttggcaccaagcgccatacggacaccgatctctcttgtacgctccgtgatggacaccagcatgatattcataacgccgacaccacccacgatcagtgaaatcgctgcaataccggaaaccgcgatcgtgatcacgttgagtaccgtattgatcatgccaagatcagatgccatattgtatgcactgacgtggaaatttttgttgtttgcatacatctcatcaaaataagataaaacatccgttgttgcctgattgacatctgcaagaggatcgatcataagattaaaataatcataaccagtcctgtcagtcccctgcagtttaaaacaggtctgaagagggatcatcaattctgttacacggtctttttccggtatggacgtgtccacttttccaaataatgcttggttatatacataaacgccaactacaacaaaatcaaaaattccgccatccgatgttgcaacagaaagtgtttcaccgatcggatctttacctgcaaagtatctctctgccatcgtatctgcaatcaggcatactctctttttcccctgattatctgcctttgtcagatttcttccggcatgcatttccagtttcatatactctaaatattccggtgtgataccatcaatattgacatttgcataattcttggaatcagcatcatctttaatggttcctgaaccaagatagttctgtgctgcaacacctgttacctcatccggatatttttcaatcaatccatcgatcatatcctgtgtgacataatcgctgtctgtcatatccggctgttcccaggtagcccagtcttcatcattttctggataacgtgcctcgacatacgcctgtaccatatttccaccaagtgaattcatggttgccgtcagcgtactctgtatggaaccaccgatcgtcgtgataatgatcaccgaactgataccgatgatgattccaagcatcgtcagaagcgaacgcatcttgttgctggaaatactcgtgattgcctctttgatattttcccaaaacattaatgttcacctccattatctgccacgatctgtccatctaacagagtaacgatacgctctgtctcctgcgcgagttcctgggagtgtgtgatcagaacaattgtttttccctgctcctcatgaagcttatggaataagtccatgaccatatgtcctgtcttagaatcaagtgctccggtcggctcatccgcaagaatgatcgccggatcattgatcattgcccttgcaattgcaacacgctgtttctgaccaccggaaagctcattcggtctgtgatccgcacggtcttccattcctaccattttgagcatttccatggcatgttcttttccgtttttggaatgttcttctccatatagtaatggaaccataacattttttaatgcattggctctcggaaggagattaaagttctgaaatacaaaaccaatcctgcggtttctgatcgcactccgtacttcatccgacattccattgacatcctgtccctccagataataatctccctgtgtctggcggtcgaggactcctataatattcataagtgtactcttaccggaaccggattcaccgacgatggaaacaaattcccctttatttacggtaaggttgattccatgtaaaatttcaagttcatttggttttcccaaataatatgtcttaacgatattttccattcggattactggttcactcactactcatttccctccacgctggtgctcataccttctgcatctgaggtttcatctgtagatgcgcctgttcccatatcctgctcggaatacatctgttctggtgtaaactgctgtccttctgtcaccgttccggagtaatcataaattaatttatctccttctgccagatctccaccggttacttccgtatagtaatctacttcttcaccaactgtgatattcttcttcaccgctgtagcagaaccgtctgcatttgcctctgcaacaagtacatatgtatttccgtcatcatccgtcttgacaagatcataaggaatcgctaatacttcacctttttccttgatcatgacttttgcttttacttccataccgacaagtaattctttgttatctaaagatatctctacggaatatcctccggatgttgtctgtccgtcagatcccgtggactgtcctttgacacgtaccactctggtcacagttccattaatggtctcatctcccatggcatccgctgttacagttgctttcattccctcttcaatctttaaaatatcagcttcttccacagttgccaccatttttaaagaactggtatcttcgatcgttacaagtggtgtttttgaatctgcattaacatctccgacagaaacattgactgccgtcacaactccaccgcaaggtgctgtaatattgcaatcttctaactgttcttttaaatctgtcagtttatctttggaagatgaatctgatcctttatacttgtcaagttctaccgcacgctgtgcatcctcgatcgtacggttcgtggtctctaatactttctggtaatcttcctcagcagtagtaactgctttctgtgcagctaacaaagactgaaattctgcatccgatttatcttcactcttatcccacataatactctgtgcgttataagcatcctttgcatcatcaattgctttctgtgcagctgcaagctgtgtctgctgatcttcttttgcacgactgactgtttctgctgtctgctgtgaattaatactgtctgtcgcatttgtatcagacatatttttttcgagatccgcaatctgatcctgaatcgtagaggaatctaatgtacataatacatctccctcttttacaatatctccgacctgaacattaactgctgtgatttctgctaacgcttttgaagttgcattattcttcgtgatacccgatacagtaccttttaatgaaatcgtatcagataaatctctcttctgtaccggctccacctctactgtattgactgctgttgctacctggcttgtcattttctttactgaacttccaatgatcgcagctacaacgaccagaaccacaagcacaataataactacttttttctttccctttttcggttttgtcttgtcacccatttttatttctcccttttcttaattcgatttacggtgattgtatcattatccttttgtcaaaaaaaggcacttaagcaaatattaagaaatcttaagttttccatccgtaaatctttcatttttgtattactgtaataatacagtggttttgttggagtgtcaagacatttttcgtatttggtataattttgcataccagttttccctgtcttttaaaatctaccgtattctttcatcgtatcatgtgcaaaaccggcacatgatccaattcaccgttcgtcaatcatgcaagcatgttgactcacttgcgttcattatatcccggaaacagagcatcatttcccgtgtcagactaagtccctccggatcatccgggacatcctcaaaatcaacccattctgcgcaggcaagttcctcctcatccagtctcatcgcatctccctcatcatccagttcacaaaaatagccaagaagaagattgctgtcaaatccccaaggctgactcttgtaataacggatattttttacggaaagcccaacctcttccttcacttccctcgccaccgtttcctccgcagtttcaccgatttcggtaaagccggcaatcagtgcatatcttttatattcacggtttgcatattttgtcatgaggatttttctgccgtttgtcacgcccacgatcactgccggtgctattttcgggaaaaccatgttgttacagtccggacatgaaagcatccggagtttttcactatgtaccagtttatgcccacatctcccacaataaacattatcgcggtaccagacatacagatgccatgcggtcgcagctgcaagcacccgctctttcggctgcatggtgcgtgtctcaaacattttatagtatacaaatcccggcacctctatcccttcccccggatctgtcagaaaataatcatcctccccgatggaaaaaagataaacgcatgcagggatttcctttcccatcccacgacagatttcagaaagttctttataggtcagataacacacctgaccatcattttttgccagaatacggttatctttaaagatcataagaaaactgtctgcctgtggtacctttttgtgatattcattactaagatgcatcggaaatatatcctgaatcattgtatttttctcctttatctgcatttattctgacagaacctgaaacaaatcacacctaaaatctaatcttctttgtgccatcattcaaaaaacggatgatatttcgctttgaaataccatccggcctgtcatattatttaaccttttttaatatgtttatgtgtaaacagatgatcctgacaatattcataattgccgtcacactttgaacagaaacggaactctaaattcggatcatcaagttctgtcctgccacaaatcgcacatttgtgcttggtaatgccggaacccggtctgggttgacgcatctgggacttgaactgctgtctcctgtgtatttcatgcggcgaataacgtttgaaattccgcgttgaaaagaagaaaatgataaaattgagcagggacataaagattgccactctgccggcccatccactgacaataaactcataaagcgtcagtatcgcataaacaatcgccatccatttcatcttgattgggataatgaagtaaagcattacctgcatatccggatacatcacggcaaatgcaagaaaaatggacatattgatatagtttgtggaaaatcccgacgcaatcgaataagataactgtgccgccagtgcaggcatctgcgaaattacagatgcattcattgcataataaataccgtacagaacaaatgcaccgatcacagtaaatatcattccaccgaaaatatagacattaaaccggaaggttccccaggtacgttccagtgccatgccaagctggtaataaaacaatgccatgatcagtaagaagatcagattggactctgtcggcataaacacccatgtcaccagtctccagatctgtccatgtaaaatatgatagggactgagtgtcagatagcttaaaataccaggcgatacggttccgaatacatagccgatcgtataggctccgatcagccatataataaggtttggaacagcgtaacgaccaattttacgttctaatttatttaaccagttcatcggataaaaccctaacctttctttgaaaacactacttttttcagtatatccgtatgcctgtgctttgtcaatccaggctgattttattcataaaaagtttatatttttccccgatttgcacattgtcttttgtaaaatcatgtcgtataatgtactttgcttggcttttgcccggcattctttttaataagaagaaacagccactttatttatatattatccggattttccggagttactgactggaggaaattatggaaaataatacgcttcacaaacttggaattgatatcggttctaccaccgtaaaggttgctgtgctcgacgagcatgacaatctgctcttttccgattatgaaagacattttgccaacatacgggaaacgctttcttctctgatccagaaagcattcgatcagctcggtgaccggaaggttgctccaatgatcaccggttccggcggacttacacttgcaaagcacttagatgttcctttcgtacaggaagttatctctgtgtctaccgccttacagcactatgctccacagacagacgttgcgatcgagctcggcggtgaagacgcaaaaattatttattttgagggcggtaacgttgaacagcgtatgaacggtatctgcgcaggcggtaccggttcttttattgaccagatggcttccctgattcagacagatgcctccggtctgaatgaatatgcgaaaaattacaaagcaatctacccgattgcagcccgatgcggtgtttttgccaaaacagacatccagcctctgatcaacgaaggtgccacaagagaggatctctctgcttctattttccaggcggtggtaaaccagacgatcagtggtcttgcctgtggtaagccgatccgcggccacgttgcattcttaggtggtccgctccactttttatctgagttaaaagttgcatttatccgcaccttaaacttagatgatgagcatgcgatcacgccggacaattcgcacctttatgcagcgatcggttctgccttaaactgcaaaccggaacagaataccactctctcttccatgcttgagaaattaaactctgatatacatatggaattcgaggtagcacgtcttgatccgttatttaaagatcaggcagaatacgataccttccgtgcccgccacgacggacacaatgtaaagacaggtgatctttccacctacgaaggcaactgttatctcggtatcgacgccggttccacaacaacaaagatcgctctcgtcggcgaggacggttccctgttgtattcattttacagcaacaacaacggaagcccgctttccactgcgatccgttccatcaaggagatctatgaaaaacttccggcaaatgcacatatcgtacactcctgctctaccggttacggtgaagctctcttaaaagcagcgctgatgttagacgatggtgaagtagaaacggtagcccattattatgcagcggcattttttgatcctgaggtagactgtatcttagacatcggtggtcaggatatgaaatgtatcaagatcaagaaccagacggtagacagtgtacagttaaacgaagcctgttcttccggctgtggttcttttatcgaaacatttgcaaaatccttaaacttttctgtacaggacttcgcaaaagaagctttatttgccaaaaacccgattgatcttggaacacgctgtactgtattcatgaactctaaagtaaagcaggcacagaaagaaggagcttccgtagcagatatctctgccggacttgcctactccgtcattaaaaatgctttatttaaggttatcaaactctccgatgcaagtgagctcggaaaaaatatcgtcgtacagggtggtactttttacaatgatgccgtgctccgcagttttgaaaagatttccggctgtgaatgtgtccgtccggatatcgcaggtatcatgggtgctttcggagctgctctcatcgcaagagaacgtcatgaagctgactatcagacaacgatgctttccatcgacgagatcaatgcattaacttttgataccaaacttgcaagatgtcagggttgtaccaaccactgtctgctgacgatcaaccgtttctctggaaaccgccagtatatcacgggaaaccgctgtgagcgcggtgtcggcggcgtaaaaaacaaagaaaatattccgaacttatttgaatacaagaataaacgcttattcgactacccttccttaaagccggaagaagccctgcgtggaacagtaggtatcccaagagttttaaatatgtacgagaatttcccgttctgggctacttttttcaaaaaactcggattttccgttgtactgtcaccacagtccaccagaaaaatctatgagctcggcattgactcaattccaagtgaatccgagtgttatccggcaaaacttgcacatggacatgtgacctggctgatccatcagaatgtagactttattttctacccatgtgtaccttatgagcgcaatgaatttccggattccaacaaccattacaactgcccgatcgtaacctcctacgcggaaaatatcaaaaataacgtggaagatatcacttccggcaaggtacgtttttataatccattcatggcatttaccagcgaagaaactttatcttcccagcttgtaaaaacctttggtgcaccggaatttgccatcccggaatcagagatccgtgacgctgtttccgaaggttacaaagaacttgctgttgtccgcatggaaatgcagaaaaaaggtgaagaagtcttagcttatatggagaaaaccggcaaacgcggtattgtattagcaggacgtccataccatgttgaccctgagatcaaccacggtatcccggaactgatcaattcctatggtattgccgtactgactgaggactccgtttctcaccttcatcaagtggaacgccctctgatcgttatggatcagtggatgtatcattcccgtctgtatgcggctgcaaactttgtaaaaaccagggatgaccttgatctgatccagttgaactccttcggttgtggcttagacgcagttaccaccgacgcagtcaacgacatcctgacaaaatcaggcaagatctacacatgcttaaagattgatgaggttaacaacttaggtgctgcaaggattcgtatccgttccctgctctccgccatccgtgtgcgtgagaagaaacagacaaaacggacaattattccttccaactataacagagttgttttcacggaagaaatgcgtaaaaattatacaattctctgtccgcagatgtcaccgatccactttgagctgttagaacctgcattctgtgcagccggttataacctggtggtaccggatgttccaagccgcacctgtgtggatgtcggattaaaatatgtaaataatgatgcctgctatccgtcacttattgtggtcggacagcttatgagtgctgttatgtccggaaattatgacatgaacaaaacagcgatcctgatctcgcagaccggcggaggctgtcgtgccagcaactacatcggttttatacgtcgtgctcttgaaaaagcaggatatccgaatgtaccggtaatctccatcaacttaagcggacttgaaagcaatcctggctttaaactgacgccttcactgatccagcacggactatatgcattagagtttggcgatattttccttcgctgtctgtaccgcacacgtccttatgaagcagtaaaaggatctgcgaatgcactgcatgagaaatggaaaaaagaagtaatctcctttatcacacaagataaactgttgtcccaccgcaaatttaagcagatgtgccgtcagatcatccgcgattttgacaaccttgaccgtgtagatgtgaaaaaaccgcgtgtcggcgtcgttggagagatcttagtaaaattccatcctgctgcaaacaacgatttagtcggattgttagaatccgaaggcgcagaagctgtcgtgccggatctgaccgacttcctgctctactgcttctataacaccggatttaaggctgacaacctcggtttcagcaaaaagtccaaacgcattggacgacttggcatcaatttctttgaatggttaagaagcgctgccagagatgaatttgaaaagagtaagcattttgatccgcctgctcatatcgacgatcttgcaaattatgcaagagatatcgtatccgaaggtaaccagaccggtgaaggatggttcttaaccggcgagatgatggagctgatccacagtggtacaccaaacatcgtctgtacacagccatttgcctgcctgccgaaccacgttgtaggaaaaggtgttatcaaagagctgcgccaccgtttcccggaatcaaatatcgttgccattgactacgatccgggtgcaagtgaagtaaaccagttgaaccgtatcaaactgatgctctcaactgcaaacaaaaatcttgcaaagcaatctttataaatcacacacagatttatcatcatgcattaccgttttcacagccgcgcttatagggtgcggctgtttttcttttgtgtctctgtaaatattatttccagacagcataataattccggttctgttcgaccggctgtgaaaaatctgcctcatatcccttgtcgtcctgccagcctgcgaactccctgtctttgtattccggcactgcgggtgcactgatcgtatctccttccgtcacacagtactttttataacattcactgttatctgcatctttataaaactgtacataatatttctgaatttctactatttgcaacttgtctgccaatacagtccggctgcatttcacagtaccggtttttccattcggatgcacaaacgttctatctactcccacagaaaatagtcccttctccttatcagctcccatgatccgcattacaataccggtttgggcatccagctcctttgcaatctgttctgtcacatccgcggtaaattcctgattatcggctacattatacaactgttttatctttacattacaaagtatattttctacaaccgccggaagctggctttccagctctgtagcgtaattcatacggccggttaccgttaatattatcagaattgttattgcaccaattacgattccaatcatcatagttatcatgtttttcacttttcccaccctttatctgtcattcatttaccggtatatttaccacggcatatctgactctgttatcatgatcttctgtcatcacacttacttcatacacccccggcatctgaaaatccaatttattttccagcactgttccatcgggtgaaataactttcatcaactgtatctgcaattcattttctgcataatcccacgcctttataatatctgtcatctgatatgttccaattttcagatatcctgttatggctgtttcaaaatggggtggtgctttttgtgattcctcataaaacgtttcaaaatctgccgggttttccatctgctgatccatatgaccagatacgatctcaacgattcccttatttccgttttcatccgtcactcccctaaaaacaagccacattacccccacaaggattatcgcctgaagaattgttttcccataaactttgatcacttcatgcatatccacctcctatccgccgcagatacaattcagaaactgctgcacaaattcataaacggctccgccctgcctcatattttcataccagtaaccaactaaaaaaagtgtcacggtaattgtcagaaatccacttccaaattcctcaatgatatcctccatctgctttccctttcctgtgttctttaaaaagatgacacataatttaaaatttcataaaacattcttatcactgcactgccagccaaaatccccagaaacgctccgccaaatttttccacgatcatcataaggctcaaatctatcacctcgcaatcgcatatgtaatattctcttcgtaaattccaagtaccggtatgcggtaatgatactttaatgccacctgtgcagctctcatattttgccatgcgtcataaacacaatccgaaatctccagttcatatccgtcctctgccgccttctttttacaggcatcgatcacacccggattaaaattactgttttccagttccgcaaccacctgtgatttatactcttttgcagcagcaacctgcccactcgccccgatcagacctgtacatataaaaatatttgccatcattataaataaaataccaaatgccccgattatctgcctcattgcactgcacctcccatacttccaagcatatgaaacatcattatcattccaactgtcagatcgatcagaagttttacggttgccgctataacaggataagaaaatatcattttctgtctaaatgcgatttttccatttcggatttcttctgcccggttctgcatttcattcacatgcatgatcagatgattcatctgtgtcactgcatccccggttcccatctccgcaacagcatgaagcattttcatgcaattctgtgcttccggcacatcaaattctttgcaaaattctgtatatgcactcagtttttccggcgttttttttaatcgctcctccagacattcaatctcatatctgagcaccggcggtgcactgttttttgacttttcgattgaaacctgtacattattattctgcaataacagagcaagttccataaaccagcccggaagagccagataaacagcctccttcacatctctttttgcaatctgataccccaccttatgctgcatggctaaaaaaagcgtcaccgggaataaaattcctgcgagaataagttttccggccaatacagcagctaacatcataccagccgccggcaatgcccataacatactttttcttttttcctttttctcattgtaatggtacaccatttcacagcttgatctgatttcctgttctttctccaccttctctgtggctagccagtcattcgtcagattcctcgaactctttacaaatacccataataggaaaagcagaaatacaagtgatgagacctgaatgatccctactccaaaaatattaaaatccgttttcaccacaaaaagatctttcatggaatctaacacatacaatgccgtcgcacacaaaataacggatacaatcacagaaataatgttatccgtatgactttttttcttctctgcctgaagctgatagcctctgcgcttccacaattcgatatcttctaacaggagcagtgcagactcactcatctctcccccatgttcctcggcattgatcaaaagctcatgaagcatttttattttagggcattgatattgactttcaatcggttctaatgctgattcaaagacattttctcctgcagagaagtctccaaattccagtttcagaatcacctgctcaatacaggaacgcatcttcccttcttcaaatatttctctggtttcctttaatgcacttaaaatttttcctgttttctgaaatgcatataacatctgctccatatattccgcagcatccgcaaatcgtttctgctcgtacatcttatggtacatatccagcaccagaaccggaagcatcatgataaccgcggtcaacgcgatcacaacgccgcccgctttaagccggaacacggcacctatgccaatcacccctgcgagtgccagaaaaatcatcactgcatgggttttccacgaaaaatgatacccatacatatccacttttttctgcagatttttcggattccaaaaagtcagccaccccacgatacatcctctcctttcatcggttctctttaagatacgtttcaaactgtctgcatacaaaaggctcctccacgcctgtttccctgaacctttttttgatatccggcggcaattccttcgatacaagcgccccatcatcgacgatcatataaattctgtttttcccttcttcacgcgaaaaaaaacatagctgatctatataacgtctgacctttccatcggaagattcgatttttcggatcagaactgctgcattcacataacggtaaatccgattttccatacgctgtgcatcattgacattattcatcatatttaatatccgatccggaagttttctcacatcatccagatggatcgtcgtaaatccatgaacgccggtgctccattgctccaacaatgatgttacctccacagagcgcgcctccgagagcatcagccagcttggattctgacgcagtgaggctttgattgcatctgtataatcaaatccctttccgacacgaagttcaacagcatctgcaccgggattgatgttcgcataatggatctccaacgaatcttctatcgtgataacacgctcttcctttctgataaactgcataaaaaattttgcacattctgtcttgcctgcccccggctcccctccaaaaacaagattcatcttcgcctgcacacaatttaacagcagatgcagcacttctttctcacagtacttctgatccagcagattctctaaggtatttcttacaaaacacggggatttacggatacagatgctgatccccgatatcgccgccgactcatgaataatactgattctcagttcttttgtatccgcttccagtattttgtttgcattattaaattgtttattgatacaatttgagatattgtgtgtaaatgtactgataaaatattccggtatctcctcatttgcacagtacctcccctctttcagatctgtgatccataatttttgcccattatagtctacatccgtcacctccggtctgcttaaatatttccagaatatcccgaactgttccggtgtgggttcaaaaataatcttttcactcatcttttccagattctatctccttctccattttctttgcctcttcctaaggacgaagcgcattcatattgtcaaaaaaaccggtaagtgtattcttaaattccattgcaacatatccgtccgacgacagtgccgccacaatgatcgcacctaatgccaataatacgattaccgcaagaattgcatttccataatgtttcattacctgttccataattgatatcctccattttcatttttttccatttgtttcatgagaagaaacagattatgttccatttcttcgaaaaagttttcattacgttctgttctcgatttctgtctccatgacttcataaaattatcaatttttccctgcgctgacacccactccaattccccgttttgcgggatatagcctatctgttccggcgcaatacgatacctgtccatcatatccgtctttaaccggcttgcatgcaatgcatagccttcgaccagataaagaacctttttgtgtctgactgtaaaattgcgtatgatctcctgccattcactcggataggtatggatccctgcgacaataacatctgcattttttaaactgttttgtgtttttttgtctctgccacatccacaatctgcaaataaaattctgtcttttccaccggaaaaaatacactgccagccattctccctatgcacaaaaatactatgtgccggtctgatttttgccagaagccatgacatcacaatcatattttctgttatatggcaggactcttccataccccagaatgctatttttacagacatgtccgctcctttttcccattacaaaaaaggcgggatatccctctgaaacagcctttggcaataaaaattgttctgtgaaataaattgacaataattgattctaataagatggaaatccctgtctgatttccagcgatacggtctgtcatacaaccgtaaaaatgtctgctgatctgttcatcctgtttcaaaaccgctccaatctcctcaatatatagaacgatctaagatgcttcacgcaaacccgataaaaagatagtcatatattacttcattttattatgtttgtaaagaccttattttatttttttcttttcttttagccatgtatcatttataattgtgcatgaacattggataatatctgactgacgctatccaaaaatatttacaatatgatctggaggagttcatgaaagagtttgtaattgtaactgatacaaccactgatttaccaagagaatatgttgaaaaacatcacttatacatgatgtcccttccttacaccttagaaggcacatcctacacctgggaaaatccaatgccggtcaaagagttttatgataaaatgcgtgccggatcattaccgaccacctcacaggcgaatcccgaagaagctgctactttgtatgaatcgattctgaaagaaaatgatgtggatattctccatatcgcattttcttccggtctcagcggaagttttaacagctgcaggatcgccgcagcagacgtatgtgaaaaatatccagaccgccgtatcgtagttgtggattcacttgccgcaacattaggtcaggggctcttagtctataaagcagttcagttaaaggaagctggaaaaaatctggatgaaattgctgtctggttagaagaaaacaaatatcatctcgtacataattttaccgtggacgatctttttcatctgcatcgcggcggacgtctctctaagacagctgcaattgtaggtacgatgatcaatttaaaaccggtacttcatgtcgatgatgagggacatcttgtcatgttaagcaaagtgcgcggccgcaagaaatcactgatcggactggtcgactgcatggaaaaacaactcggtgactggaaagataaaaatgatattatctttatcagtcatggtgactgcccggaagatgcacagtttgttgctgatctgatcaaagaacgttttggatatgaaaatttcatgatcggatatatcggtgccacgatcggcgcgcattccggtccgggtacggttgcactgttttatatgggggaccaccgttaacctctgtatcagccacatgttttacaccttatatataagctgcgatcccaaaagaggcatgtgaaaaatgaaaaatcatttttcgcatgcctctttttattcttcctgataccatccctctcctgctgtgcagatcaaaagctgtccaccgccttttgctgcgtggtgaatgtgccagttattacggcatcccggttcaaatgtcacatttgccataaatacagcacagttcttcggatctgtcagtggattcagataagaattaccgataaaatactgtgcaaatcctgtattctccgcacccgttccaaatacgttccgtttttcaaattcttctctacttatagtcttcataattgtattgctcctttccgttgacggattctatcatctgcttccccatcggaagtacttataaattctacaacttgaagtgcactataagtcaagagctttttgctagtttgtaaattttacagccgtaccatatgcaatgacttctgctgccccctgcataactgcagaagatgcataacggatatttacaaccgcatcagcacctaagctctctgcctcttccaccatgcgctttgttgcaagtgctctagcctcattcatcatttcattgtatgcctttaactctccgccaactaatgttttgaaactctgtgtaatatcttttccaatatttttgctctggatcgtgcttccctttaccagaccaagcatttctaaatttttgccgctgatataatcagtatttactaagatcatcttcttctccactccttatctcctgcacacgttctacggttactgcaaatgctactcctgccagtgccagcggaataattaccatcaataatttcatgatgacagtcagatccgggatcagcataaataccgcagcaattgcaacataatacacgatcagaactgctgcaatgataatcggagcgatcattttgtttcgatgttcctttttcataacttttgcctcctttgtgtattatctagttaatacaataatacattcaacagaatatgtcaaccacaaatcaacgcaaaatatccccagtcccagatgatatgttcaaaactgttttccaaatattcgtaaatatcatcttcctcatatcccgtcatgcgggagaccacaaccatataatcacgcacatcttcgtaggaaattcctcttcggcaggaagttgaaattccttcttcgcagaagctcccctccccctgacttaacaaccagtgcagaaaaacagcatgccttattgtggcatattccattgcgatccactgcacctgcacgaccatctcctctaaatttccttccggttttaaagaatctgcatacaactctgtcaaaaggaaccgccgcatcaacggctggtatttcaaaaactgtacttcaaactcctgccattcttttacaacttcctcatcgattccctgttcggataactgttctgcaagctgtgccacaggctctaagtatttttcatacaatccttccctgcgataattctctgcaaggtccaaaaacagttcgttgcgctcctcaatggaatactgcagtgtctgttcaattccatcaatcgtttctgaaagttctaaaaggaatccacccggatacatttttgccatgtctgtcaaatccagtcccaacgcatcttctgccgcatcttttacctgcttattttccatacacccatcttttgcctgctcatcttccacacgctcatatagatcaagcagcacataaaaaatcttcatcagattatgctccggcgtatgcgctccatcctccatcagcttcattaaaaatgcgcgcaagttcacaagcggcgcaagttcccgataagcagatgtatccatctctccggaaaatgaaatatgttctcttttccgcaacagatcaatgaccgccggacaagacggcatcagggcgtattctgtgacatcttcgttaaaggtatggatctctcttggaaaaagctgacaggtctgtgaaagtatctcatccccataagtaagaaccaatctgcacaattttttgccattcagaaatggacaatttttctctttatttaatccgatgactctgctgccatccttctttcttacatacccactcagcttttctttttttgcctgctgtcctctatctgtatcatacatcccgtccggcgtcagagtgtgtttccactttacaaaagtgtcctcatccaccccgatcttccattccctgcagcatgtaaaactgcaccggtctgctatacaggtaaaatcttcataataatccggcttcatttctctctcctagcttatgaataaatatagggctgttttttcaaagggtatttttaccttttgaaatccagccccacattttttataaaatcttcgtcgtccactttgagcagtcccacacggcgttcaccacatcctgatagaaatccggctcatgacagatcaaaagtactgctccgcggtattcgtttagagcacgctttaattcgtcttttgcatccacatccagatggttcgtcggctcgtccagaagcaggatgttagtcgtgcggttcatcagtttgcacagacgtactttcgcctgctcaccaccgctaagtacacgcacctggctttcgatatgctttgtggtcagaccgcattttgcaagtgctgaacgcacttcgtactgggaaaaagccggaaattcttcccagatttcttcgatacaggtatttttattttcccctttgatctcctgctcaaaataaccgatctctaaattttcccccagagtgacttcccctgataaagccggaaccagtcctaaaatactgcgcagtaaagtcgtctttccgataccgtttgcaccgactaaggcgatcttctgaccgcgttccatagaaatattaagcggctttgataacggttcatcgtacccgatgacaagatctttggtctcaaagatatattttcccggtgtccttccgagtttgaaatcaaactccggctttggacgctctgcggcaagctcgatcacatccattttatcaagttttttctgacgggacatcgccatatttctcgtagcaacgcgggccttgttgcgcgccacaaaatcttttaactcactgatctcctgctgctgtttgcggtatgcagcctcaagctgtgattttttcactgcataaacttcctggaacttatcgtaatttcctacatagcggtcaagtctctgattttccatatgataaatgatatttaccacatcatttaaaaacgggatatcgtgtgagatcaggataaacgcattctcgtactcctgcagataacgcgtcagccatgcaatgtgctctgcatctaaatagtttgtcggctcatccaaaagaagaatgtccggtttctctaaaagaagctttgcaagcagcaccttcatacgctgtccaccgcttaaatctgaaacatcatggtcaagtcccagttccaataatccaagtgctcgcgcaacctcctccactttgctgtcgataacatagaaatcatgcatcgtcagcatatcctggatcacaccaagttcttccatcatggcatccatctgatccggatcggcactgcctaactgatcgcagatctcattcatgcgttcttcctgctcaaacagccacgcaaacgccgactttaggacgctctcgattgtcatccccttctgcagggtggaattctgatccagatatccggtccgcacatttttcgcccactcaacttttccctcatccggcatcagttttccggtcacaatgttcataaatgtggactttccctcgccattggctccaactaatccgatatgttcccccgcaagcaggcggaatgaaacatcctcaaaaattgcacggtcgccaaagccatgggtcagatgttcaacatttaatatactcatatttttcctctttactttctgttattatctatatggtactcacgttttgttccggcaaaaccactattgtatgctcacgttcagcatcttttccgtcttccggtacacatgccggtacgccgggaacaaaaatgcgtccgcgaagacccatgcgaccgggcttgcaaaacatgctgccggaaaaccaaacagcggcactaatgcaaatccgacgagcgttctcgccgccatctcacagacacctgctaagattgcaaacttgctgtatcccataccctggatcaggaaacggacgatattgacaaatgcgagtggaatgtaaaatgcactgttgatcaataaaaacaggtatacattcccgatgacttccacctcagcgcgttccacgaagaacagtgcaagatttcttccggtcagcgcaagaataacaaatgcaaggatcgcatatccgattccaagcatggaacatgcctttaatcccttcgaaatacgatccattttctttgcaccgacattctgtccgccataagttgccatcgtcgatcccatcgcatcaaacgggcagcagaaaaacattcctatcttgcttccggcggtcatggatgcaactgcgtttgaaccgagcgtattgactgcactctgtaaaataacacttccaattgccgtgatggaatactgcagtcccatcggcacacccatgccacagagtgttttcatataagaactgttccaccggcgttcctctgcatccggatgcaggatttcaaattttttccagctgtagatcaggcatccgattccggacactgcctgagagatcaccgttgcaagtgatgcgccagctacacccagatgaagatttatgataaatacaaggtctaacgcaatattcatcacagatgagattaccaaaaacacgacgggggtcttgctgtctcccatcgaacggatgatggccgaaataagattatacaaatatgttgccggtattcctgcaaaaatgatcacgatatacagatacgccccgtcgataatgttgtccggcgtgcgcatcagttctaagatcgggcggcagaatactactgtgactgccgtcatgaccactgcaaaaattgcagataaataaatggcatttaccataaatgcacgcagtccacggtaatccccggcaccaaatttatgtgccagtggaattgcaaaaccgttgcagacacccatacagaatccgatgatcaaaaagtttaaagatccggtggaacctaccgctgcaagtgcatccacaccgagaaatcttccgacaatgagtgtatccaccagattataaaactgctgaaacagatatccaaacaaaagtggaatggagaaacctaaaatcagcttcatcggagaaccattcgtcatatcttttgtcatatttcatcctcttttcccttatatttccccacaatgtttttcaaaaatctcaaaaaaactgtccgtctgtataccatctgtggtatctaatgtgagttcatcccacatatctttgttgatactggaattcagtcccgccacaaactggttatagacatcatcaaatgcctctttttctcttttttccacgatattggacttgtttgcctctgtcagttcctcattatatttattcaggcatttaataaaataaaaccctttgcctgcctggatcatagacgacgtctgtccattatcaagattaaacgcaacctcctcgacctctttgggcagttcatccctgaccaccgtagtctgtatggaagaaagttcattatagttatttgccacagatgcaaaatcatctccacgctctaactttgctgccacatcacttgcctttgtactgtctgcgacaaatatctgcatgatctcgatcacacgcgcctcatcgtcactgacttcctcatttacactgtttgtcagcgaattataaagtttctgtgctaatgcgtaatgctgataatattcgctgatatcgctctccgtcacttcaagataagtattttcttcttttgaaagtgatgcataatactctgccgccgcctctgatattgcagaaagctcatcctctgaaagtgcaacttcccttgactgtgcaagcagatccatgctgaccacctgggttaattcttccattgtgaccgctttgatatattttaccaatgaatcatccccgaaatcatgtttccagagatccacaccatatgccgtcccgtagatattctgataattcgtcagataaacccgcgcctctttcaaactgcagacggttccctcgatcttgaatacctgacggtcatttaatatattcgaaaccacaatatttttatttccgatccggcatccggtcaataacagcgacatgccacacagcacagctgctacccttgtaaattttctcttcatcctaatttacccaatctgatagaaagtcctattgttccattgattttaagatacttcttgcaacggaaattccgtttgcagatgcctgctgcaatcctctcgtcacagatgctccgtctccgatcgcacgcagtccttttacgctggtttcaaaatcagagttgaccactaccttgttggaatagaattttacttccacaccgtaaagcagtgtctcgtcgctggcaatacccggtgtcaccttatcgagcgccattagcatttcctcaatatcgaccatgatacggtgcgggaatactaaggaaagatcacccggcacagcatcctttaaagtcgggatcaggttattcctgcagaggcgttcctccgttgttcttcttcctctcttgaaatcaccgaatgtctgtactaagatctttccgtcgcagagcatgttggaaagctgtgcgatctgtttaccgtactcgatcggtgtcttaaatggtttggtaaagtttttggaaaccaaaattgcaaagttggtattgttggtctttaaatctttcgacttgtatgcgtgaccgtttaccaccgcaagtccgttatcgtagtattctgttgcgacctcaccggacgggttggtacagaaggtacgcaccttatcatcaaatgtcggtgtatggtaaaccagttttgcctcatagaggttctgatttaaaaattccatgacctcatcacgcacctccacacgtacaccaatgtctacggtacctacctttgtttcaatatcatgctgtccgcagatatgtgaaaaccagtcagcaccctctcgtccaactgcagaaataacctctgctgcaagatattcctcatctttttcggtaatgatccctttgaccttgttatcctcaatgatgatatctttgaccatggtgttaaattccatctcaacgccctgctctaacagatgctcctgcagtctggaatagattttgtagccttcctctgttccaaggtggcggatcggacattcgatcagttttaagtttgcattgatcgcttttctgcggatctcacggatctctttttctttatccactccgtaaacttttgtatctgcaccgaattttaaataaatatcatcggattcttttaataattccacggttttatcatagcctaaaatttccggcagatttcctccgacatccggggaaagtgacagtttaccgtcagaaaaagctcccgctccggcaaatccggtcgtgatggaacaaggtttacatccaacgcagacttttgtcttacgtttcggacattctctcttttcgattcgtctgcccttctcgattattaaaattttcagattcttctttgcatggatcagttcatatgcacaaaagataccagatggaccggctccaataataatcacatcatattgtttcattcttttttcctcttacctgtctatttgtcctgtttaccgatttctcacacgcatctgtattttggcatagcgtattccataaaaacgtcattcctacgcttccacgatcagatatctgccgtccgggattgcaaaaacttcctctgcctctgctaaatccgcattgctcattccggcaatatctgcgccctcatcttcaaaataagcacggacttctttgatatttttgcagacaactgccatgcagtcctctaaaaattcttcggcctcctccggcgattctgcaacattttctttaaaaagctgcatctgatgttccaaaaaatactgtactaccgcttcatcgtacataataatcctccattctgtgcagtgtaaaaatctcatttttcacactgtattttcccgcttatctaccatgtatatgggtcaattcccagccggtcaagctctctgtaaatcgctgcaaccggaagtcctaccacattattatagtcaccgtcgattttgtcaatataaattgcaaattttccctggattccgtatgcaccggctttgtccgacggttctcctgtcgcaatataacgcaaaatttcacttttctttaactgtctgacaaaaacgtcagtcttttcataaaagatatgttcccctgccctgccggtccggtcgataaacacaaaagcaacccccgtgtacaccgaatggcttttccctgacaataaagagagcatgcggaaggcatcttcctcatcttttggttttcctaagatttcgctgcccgcggcaacaatggtgtctgcaccgatgactaaagtatcctgcggtgtcatcagcgtccgatgctcatctccatatgtttttaacatggatgcgacttctctcgccttctgtgctgcaagttccatgacaacctcttttggctctttttttatgatgatctcctccccctttgccggacagacctcaaagttaagaccgatctgctctaaaagttcacggcgtcttggggacgcggatgctaaaataatctgtgacatggtcaaatttcctttctgctgcatgcttatctgcttcttaactttgcacaaaactccaatcagactggcttttgtacaatgtttttaaattttctataccgggatcactttcccaagccggaaggaatacaacagtttttcctttactttcagcagatttccggctgcatctttctcattttcatagactcggtttagcgcttcctcgtaaagttttaactgtgccgcataacgctcggacaattccttttccgtatccacacggtctgttttataatcaagaaggacaataccgtccttttcaatccagaatacatcgatgattccctggatcagggtcagctctttccctgtatattccgtttctcctatatttcctacacgccccatgctttttaccttttccgcctgttccgtgttttcagcaaaaccaaactcgtctaactgttcatccgtaaatcccatgacaaatggtttctcacggtacaattttccgtctttttcagctgctcccatccgttttccaatatctgcatttacaaaatattcaacctgcggtatgcgaatcagtccatgcatctccggtgtgatctgttctttctccagcatcccggcgacctgctcttttgcggacacaccggaaaaaaactggtagcactccatgatgcggtgcattgccgttccgcgaagtgctccagggctggcatcctcactttgctgctctatttctcttgcaaatgcaggcacatacggcacaacctcctcgtattgaaaaacaggaactgcctcctcctctttttcaaacgcctcccgcatggcacgatgttttaactccgacacggaatacttattttttctctgcacatcattttcatatgcataccgtctgtgaaaacgctccgagaactgctgcacttttttttcatctgcctgcgcagctttttccatgcaggctgaacggttccagtcatctttgatctgtgtttccagttcttcctgcaccagttctgccgcccgcatcagacgtatctgatatttatcctgacaggatgcagccgcaggcagaatccagtccaaataaccggctgcactctcacgtcccagataagataacagttcctctggaaatgcttttatataggaaagtgtctcctctgcctttttcagacttccggttaagatcagcttttctttcgctctcgttaatgccacataaaggacacgcagttcctcgccaagattttccatatcgatctgctttgcgatagcacgttttgcgatcgtcacggattttacacgctgttttccgtccatatagtcaagaccgatgccaagttccgggtgcaataccagacggcttcttgtatcctggcggttaaagttttttcccatcccggcggcaaatacgaccggaaattccagtcctttactcttatggatactcataatgcgcacgacattttcgttttccccgatcagatctgcctcgccgaaatccacatcgtatttctgcagttcatcaatatagcgcacaaaatgaaacagtcccttgtaactggtattttcataggcgatcgccttctccaccagcattaaaaggtttgcatgacgcctgtctccggctggcattgctgcggcataatcgccgtaaccggtctcctttaacagcagttcgatcagctcatggatcggtgtatccggcacaagctgccgcagtttttcgtaggtaacataaaaccggtataacttttcttcggaatcatccctgccctgtcccggattttcctccgcttcctgtttcagacgctcacattcctccaaaacacactcgtaaaatctgacatccttgtcttttaaacgcaattttgcaagttcctcatccgaaagtcctgcgattggtgaacgaagcaccgctgtcagcgggatatcctgtctcggattatccaaaatacgaagcatggagagcacggtctgcacctccaccgtactgaaatatcctgtcgccgaaacagtatgtgccggaattcctgcatcatttaacacagcagcaaaacggtctgcatatccgctcaggcttcgcagcagaatgaccatatccgaatactgcaccgggcgcagttctccggttgccttgtcggtcaccttctgcgttcccataagctctttgatcctttttgcaatcatccgtgcttctaacagtttcttatcatccgctgcagcatcatccaacagttcatcatccccgtccaccagtaaaatttccggtgtgaacatgtccgtttcttcctgataagaagctcccggataaagtgctgcatccgcatcatattccacatttccaagattgcgcttcatgatgcggtaaaaaatatcgttggaaaaatcgagcacttcatttctgcttcggaaatttttatgcaggtcaatgcgctgcatttttgcatccgtcaggctgtaagtatcgtatttttccatgaatagttccggtcttgccagacggaaacggtagatactttgtttgacatccccgaccataaaaaggttgtattcaccgcgctcctcccgtgaaattgcacgtaagattgtctcctgcacctcattgctgtcctggtactcgtcgatcatgatctctttgaaattatcccggaactcctcggcagtctttttgactttgccggtctcctcatcgacaaagatatttaacgcaaagtgctcaaggtcatggaaatccaccagatttttccgccgtttttccgccgtaaacgtctcgtcaaattccaatgtcagacgcactaactctgccgccatcggcgccgtctttttcatctgctctgccatgatctccggtgatgtgaaaaaatactggcggtttatttttttgaccgcatcctttcccatctctcgcagttttttgaccagctctaatttttcttcgtttccgtcaaatccacgggaggaagcaagcctgtcataggataaattgcggtaattctgataaaaatccgcaaaactttcactcgcagcgatctccttatatttttccaggtcgccctctaatgctttcgcatacatatccggcccgtcatcgtcctgcgtcagtttgtatgcccgcccggaaagtaccacaagatcctctgacacccgttttaagttctgaagaagcgactgcatgaaagctgcgctttccaaagatgcctcgtcctctatgccatagctttctgctgccgcaggcagccatttctttggccatggataactccttgaaaactcatagagctgtaagatcatgccggagagcgccgcatcatttctgccggatgcatatccgtccacaaatgctaaaaattccggcgcactctcctcataatttttcaacagcacctttgcgagcacgtcctcttttaacagtttcaactcgccctcatccccgattctgaaattcggttcgagatcgatctcatgaaaatgattacggatcacatacagacaaaaactgtcgatcgtcgtgatctgggcattgtgtaaaagagaaagctgacgctgtaaatgttcgtcgtccggctgttcttttaaggcattctccagtgcatttccgattcgttcacgcatctccgcagctgccgcattcgtaaatgtcacgatcaaaagacggtcaatgtccaccgggtgctctttgtccgtaatgatctttatgatacgttccacgagcaccgcagtcttaccggaacctgctgccgcggaaactaatatatttctgtctctgagttcgatgacctttcgctggtcatctgtccatgtcattcccatgttttgctccgtttctgactttttatttttgcacctgtcacatcacatttattcaccgtccggattttttcccggctctccaatctcttcccggatatgtgcaaggatctcctcactgctgtcaaatttttcaaactgctgataggaaaatcccggcatgcgtacatcaaatccgcagatcgtgtgatatggacagtaatcgcagccgctcctgtctcctaacaggtaaggttttaccgccacatttccggcaaagatctcttttcccacatgctcaatcttctttcgcacataatgggacataagtccaaactcataggtgctcgccgtcttagatgtcgcctttaaggagccgtccgcttttaaggctaccgggatcactgtcgatgtgcctgaaaaatcagtatccatcgcaccatagatttccggatcttcattgaccagacctcccactttaagctgttctagaatactccgtctgatctcctcctcggactcctgaccatccgcatccaccatcggatctgtgatgtgataataaaaaatacctgcaggttccgtatcttttcccttatattttttctttgtgagttccagtgccgcattcatgtagacgacaagctggagctgcagtccataataaaaatttaaaagtgaaaaagtggtgttgcccgatttataatcaatgatttttacatagaccttatcgtctgtctcgtaagtatcaacgcggtcgatcctgccgcgcagacgcattttttcatcttcacccagttgaaactgcaccgcatccagccgctcggcgcgcgaaaatgacacctcaaaaccgctcggcacaaactttcctttccgcacctgtaacatcagtgcccagatcgtccgttttgccgttgcctccatccgctttaacaggtaactgtttcttgcgtcctcgaatacgtccccgatcccgctgcctgcgatcgcatcttccatgctctgggaaagcagggcttcctgcgctttctccgggatatcaaaccaggtataatccgacagctctatgccctttgcaaaacgctctaacacatcatgataaatatttcccatatccacactcgcaaactgctgcagttcccgttctttaagccgcagtccataacttaaataatgagcaaacgcacaggcagcaaactgttcgagccttgtcacgctgttttctaaggtattcccatataaagctttcgtgactgccttgctgatcgcatcatctttatgggcgccaaacgccgcatcaaaaagctgcattactttttcccgttcaccctcatccgacaggtaccatgccaaaagtgcagtccatgcctcttcatcctccaccggttttgtcagcccttccatcagaaacggcagggcactttccgcagtcagtgcaccttctaatgtctcctcctcggacggttcttccaccgcaagctgtgggaacagttttaagagtgtcccgatcagatacgaacgccgcagtgcttttccatcggagttgacgcggcagaatgtcacatacagccgctcggacggttttgtcatatttaaatacaggtaaaacttctggataaatactttttcccttgcgcccggcgccagttccaggtgatattctgccatcttttcacgctcaaactgggaaataatgccaccctgattccctgctttcggcacaactccgtcgttgacaccgacaaaaaataagatttttacatggttcagacgggttctctcgatatccccgactgtcaccgtgtcgttgcccggcgggataataccgacttttgccgcctcaaatccggcatctaagatatcactgtattcccggatcgtcatcgtctcatcgcccagcagagacgtcactttgtcgagcagatccatcacgattttatagatctggtcatattcctttgcccgcgcctgattgccatgcgcctcgaaaaagtttccacgctcctttaataactgctccatgtcaagccgtctgatcagactgtataactcataggtctgtgtgctgaccgtattgtcttttccacggaatgcctcaagcagcggcttaaaattctcataaaccgcctcacggatctcatttaaccgtgccatatcctccaatgtcccatccggcattacaaacgtccacggtctgctccagcgggatgcaccgcggatgccccgtgcgaggacataattttccaggcggtcgatctcctgttctgtaagtccatgggatcctgtttccggctgctgcgtcaaatcttcggttgcagccggatctggctccttgtcggaattttttgcctcggtcacgactctcgctgcaagcccgcaccgcaaaaaccggaacacactttcataagaaaaatcatattcgatcatctctaagatcgcccggatacactcgataaacgggtggaacaaaatatttttcgtctgatcaataaagtacgggatatggtactgctcaaagatctccggcacataattgccatactgctgcacatcccctgtcacgactgcgatatcccggtaacggtaaccattctccctcgtcaggcgcacgatctcgcgggcagcaaattttaattcttccctcggatttttcagggacgtgatgcggatatgctgcatagattgttccggtgctttgtatctgtagcttcccgctcccggacgaaagagattctgctccataaaataaaggtcggcagcattggcatagcgcctctgttttccggtcggcagtaccaacggctcctccaccggaactttgcacagttctgccactttcagtagcgacgccaccgtttttttactcatggcaaaaagttcatgtacacccctgcactggtaaaaatcttccctgacatccatcgtgacagacacgctgaccttctttgccagcacgagcagtttttccatcagacggttctggatcggtgtaaatccggtaaactcgtccaacacgatcacactattacgaagcagttcggactcttctgccacatcataaagaagctctaacacttcctctgccgtgatatatctgccctttaaatactccgtaaatccctgatacatcgtgaggacatcctgcatttttaagcgcagtccctccccaagcggttctttctccaaaaactctgccagcgcatccggacggacattatactgcatcagctctgagatcagggattttacctcgccgacatatcccatcttattcatattcgcaccaagcactttcagttctgcttttttctgttctgccaccttgcgcagtacaagattttttccggtctcttccagcacaaccacattttgttttccaagatcatcaaagacgcggtatgcgagtcttgcaaaactgagcacatccacgttcattattgcatgctgtttttgcctctcgaccagttcccgctgtgtctgcatggtaaactgctccggcacaatgattaaaaactgctgctctttattttctttcgcctgtttcagcacggaatcatacagaaaatccgattttccgctgcccgaattgccaaatataaattgtagggacatctgttttctcctgaaaattcaatcttaaaatattgtatcacacattatttcttttgaaaaatgttatcctgcgggttggagtcaaatagtgcatttaaacttcttgattgacaaatttttcacacccgaatcctgtaataaaagaaatgccgtcaaaaacatcagcaattaccacaggcatcccgatatctgcgaccagataatataccataaacggcaccagtatgtcattgagaccattcccgcaatcattgccctctttttcttctctctttccatttcctgcccctttctgccctgtcattctatttcgcatgttagtctattctaactcttttgtcaattcaggaaatttccactgtcatatcatgtatcagagagaatttgcacctgccaggttaattgccctttgccggacgcacaactgaaagttatgaagcagtccaatgatatgcaattcttggtgttccatttttaacatatataataccgcatttcataaaaccattcttttccatcagcttttgcatgatttgattatccgcatgggtatctgccctgatattttgagaaatatttttacaataatttaaaacacactgaaacaaaccatgcacctgaccatccccagcaagtctgtgaatagtaagataaggctcttcattcagccaattcccattctcaatatgcttataagcaggttctgcacctttaaacaatgcaaataccccatgtatcccatctttgtcatatattaccctgcatacattctgacaaatatcagattttattagctctgcatccggataaaaatgccccattgtgcaggatttccggactttatcatataatcctgtgcatatttataaattttcataatctgttcaaaatctgccatatcagcatttttcacattcagcatatattttattcacctccgcaactgccgatttacgagtttcatgattctttgtctgttatatcgctgaatcattacaaacaacatatcaaacaatgctgtcaaaatgcaaacggaaaattgacctcctctcctgcagaaaaaacagcctctcctgatgtctctgtaaccttgaaacttgcgccatcccatccgttgattttgatggttccttttacacttccgtcatctgatgtgaaagccagctccccgtttccattgtcaacaaatgttccttttgtttctccctctctgtaaatggagataagcgcttcatcctctccttccagcccctgtctggtgatcagggaactgtatacgctaccagtcccctgattgtccacaaacagaccgtactttgctgatttttccggcataacaaaggattccccctttatctttgccagctcatttgcaataacataagccctgttcttcgtgatctcctccagataagaattctgaagaagcggatacatactgccgttttcttcgtaagatccaatgtcaagcaaggtcacttcttccttcatgtcgatccagtttctctgttctgtaaggatcttctcctttgtctgcggatctgccagatcactgaatctgctccaaaggttatttaattccgtatcccatatgtcgaaaaaccatctggatgacagattcatttctgtctgtgtctgggctgcctgcgccagcggcgtatatttctttacgatgttctcaatattctccaattcgtcctgcagtgatgcggaacctgataccacattgtcaacatccgctttgatgtcctccgaatagtcataagtaaaatccgtttcttcatttaatacgacgtcattgtattctgtactttctgtattttctgtgctttctgtgttttctgtgctttctgtgtcttctgtgctttctgtgtcttctgtgttttcaaaactgaccgaatcttccacctgggaagattcgctttctattcctgtattattattttttactccttctttgccacatccggcacaaagtccggtcattaatattaatatcatgctgtaaattctttttttcatgtgtttatactctctactttctgattcattgggtgttctttccagttttctctatcagcaattataaatgaacatgagaaaaaataccagcggccccgtgaaactttgcataaataaaaaagcaatacctgaatttaaaataaactcaaatactgctcatgaaacatctaatattgtatctttttagccgaggtataacatttctctctatatttaaccaaacttgaagttacactgccatttcccataataatgatgaaacaaaatgttgaaacaagaacatactaactacgacagaactgcatattacataaaagtcactcttttttgaatttagcaatactcttttttttaaactacctgttatccagcgtgcaataaaatatctgtttatagtcccaaccgtatttgtaataatatcgtttatatctgtggttttaaaggtaataatgtgatgtattaagaacagatgaagatttgtttaaatcttaccgaacggacagcgtcaaataacttcccatctgactgatcactttcaaatatcagaataatttatctcattttccatattaaaattccaaactatccacatttaacagaaaatacttcatacccataattacaaagtgcttaactttacatttccatttcttctatctcttttaacataaattcttcgagtttcttcttgtcaggcaaatgtaacatatacgttgaaacaaataactgattatccattccagataaggcatattctaccatctgagaacctttatctgtacaaagcagtattcctactggaggattatctccctctatcatctcatttttcttataatatcctacataagcattaagctgccctaagactattataaattcgcatagacacagtataccacagctcatgtatctatgcgatttcttttttattgttttgttactgttcacaggtaggcattttctgaactgaaaatgccgtatgatacagtggtggtagcagattttgccgatttggaatgcgaagcatcggcaaaatccgttactggaacgaggtacgagtgaacagtaacgaaaaaaatcttaatatttgcttaaaatcccttataaactatattcagatggaaaattgtgctacaataccaatgatgggcaggtttcgcaaaaactgccccaaaagagaaaaataagaggatgggaggcaaaatgttatgataaaaaagagactggaatggttaaagcgcggtctgtgtatcacattggcgggtactatgatcatctgttccgataccatggcatttgcagcagaagcggcaaacggacaggtcgtagaacagacggatgccacagaaaatgagactggggttttgacggatgctcagtcagaccagaccggagaaaatggtgaacatgaggatccgtccggggtaacaggacagactgaagccggcgaggcagccgaagccggcgaaacgacagaaacaacggaagtaaccgaaaataccgagaataccgaggtgacggaaactaccgaagtgacggaaactaccgaagtgacagatcctacggaaaccactgaggttaccgaagagacggaaacaacggaagataccgagattaaggaagcgactgcaaatggagtcatcataagcaaaaaagataaatatgcagttgtcagcgcgggagaaacagtgacgcttccgggatattcgtttgagacaacgggagatgatgagccggaggttgagtggctgatcgatgataacagtatcgcagcacttactacgtcaaaagtagatggaaagcttacaggagaggtaaagacattagcagcaggtgttgctgtccttacacttcaggtaaaagatacaccggctgataaagataattattatattgtcgtaaaaccgaaaaatgcgccgtcaagctgtacggcggatacgacatataatacagtaagtttaggctggtcaaaaacagcagatgcagacggctacaccatcacacgaaaagtggaaggctcagatacagagcagacgatcgcacatgtggatggtaccgatactgtgtcgtataaagatacggcagcagagaccggaatcagctatatttatcatgtatatgcctatacaaaatatacgaacaacggacagacggattatgccaatacggatacctatgcatccgtaaaagcaacaccacagcttggaaaagcagcaatgacatctgttacagcggaaggttacagcagcctgacactaaaatgggaaaaagtggatggtgcaaccggatatatcgtatatcgttccatagataaatcaaaagtggacacacagctcacggatatcacggacggtgcagtaagttatgtggatgccgcactgacagccggaacgacatactattataaagtacagccatatcgtgtggtaaacggcaaaaaggtttttggtgatgcgtcgggcattctctccggcaaaccgcttccgtcagcgacaagattgaacgcagaatcagccggatataaagaagtaaaactggcatggagtgccgtggatggtgtgacgggttatgaggtttacagaaaaacatcatcatcctcttataaaaagattgcaactgtaacaaatggaaagacaagttacagcgatacaaaagtgacagcaggtacagcctatacctataaagtaagagcctataaaacggtaaatggaagtcaggtatatggagattattccaacgaggcatcggcaacccctgctttagaggcaccacagattatagttagaaatgcgtcttacaacagtgtgacgatcacatggaatcagatcagcggtgcacatggctataaagtatatcgttctacgaaaaaggacagcggctatagagctgttaagacagtcaatgataaaacgacgattacctgtacagataaaaaattgtcggtaggaacgaagtattattataaagtctgtgcattccgtacagtcggggataagaatgtagcagggaactattcggatgtgcagtcgatcaaggcggcaccggaagcagtaacattaaaatcagaagcagcaggtgcaacggcgatcaaactgacatggaataaagtgaacatgccatccacaggtggcggatatgcagtatatcaggttgtaaacggagcagatcagctggtaaaaagatgcagtacaaagagtacttcttatacagtgacaggacttacaccgggtcagaaatatacatttaaaatcgtatcttttgcaaaagataaaaatggcaaaagagcatatggtggaacttccaatgaacttactgcaacaccgaaacttcttccggtaacgatcgacacgatcaaatccggcaaatacaacagcgtcgtattgagctggaatgttacttccgcaggggatgaggacggatatattgtttaccgtgcagcttctaaaaaaggaagttataagcagatcggaaccgtaaaaagaaagagcggagccatgaccggatcttatacagataaaaacgttaagattggaaagaagtattattataaagtagtaacttacaaaaacatttcgggcggtaaaatgctccgttccgcttattcaggtgtaaaaggcattacagccgcaccgagtatcacaacggttaaagtgaaatcggcaggaaatgaaagactgaaaattacatggaaaaaggtaaaagcatccaaaaaccgttatgtaaagggatatgcgatctaccgcagcacttccgaaaatggaaaatacagaaaaattaagacgatcaataagggaacaacaacttcgtatgtggataagggacttgtaaccggtaatacctattattataaagttcgtactttctgtacgtccggtggaaagaaaatctacagtgattattccgatccggcatccatgcaggtacttccgggaaaaccttccatccaggtagttgcagcaaattataacaccattacggtctcctggaagaaagtagaagggtgtgatggatatcgtgtatatcgtgcaacagagaaagatggaaaatataaatcagtcaaaacctgttcttccgttaatacgctttcttataagaacagtaagttagagacaggaaaaacctattattataaagtaagagcttatgtgaacaaaaatggcaaaaaactttatggtgactattccgcagtgaaacaggcaacgccggttctttcaaaaccaaccggattatatgcagcctcaattgctgaaaaccagatcaagctgacctggaatgcggtggatggtgcagaaacttataccgtattgagaagtaactctgagaacggaaaatataagattgcaacggaactttgtacaacaaattcttttattgattataccgctgtgacaggaaaaacctattattataagatttatgcggttcgtggagagtacgtcagtgcaacaacggattgtgtaagtgttatatcgtcagcacttgaagtgagcacaacgagtgtactgatcaagacaggaacgagtgtaaaagtaacagcaactgcaaaaccatacggtgtggtatactggtcttctgctaactctatgatcgccgttgtttcctcagatggaacaatctatggactgaaggctggaacaacgaccgtaaaggcatctgcaaacggaatcaccaaagaaatcacggtaacggtaaaagacaaacttgagacagagaataagatcatagatatttcaagtgataacggtacggtagattttaatgcgatcaaggcagccggatacgaatgtgtaatgcttcgtatttccaaaggaacaacagcggatgcgaagttccagacaaattataagaatgcgaaagcagcaggccttaaggttggtgtatactgctactccctggcgcagaatgcagcgcaggcaaaagctgagggtgataaagtattaaatattctgaatgcacagaagttagactatccggttgtatatgtacttgatgatatctcattattgtacaataatgtaacagcaacacagagaattgattttatcaatgcattcaggacagaaatcattgatggtggaaaacagtataagtttgcacttggtctgaaccagaaacttttacagcagtatccgggcaaatatgtggatacaagcaagctcacaggaacagatctgtggattatcaattatcgtgcagagagtcttggaagcggttaccagggtaaaggtaatgtggtaatgtggagatacacgaaccaaggtacagtaaatggtgtaaatggcaaggtaaatatcagtatccggtataagacttattaatgagagtacaggatacagacagtaatccgcaggaatgaggacagctatgaaaagttatgcaaaaaaaatcatgacaagactggcagcaggggcgatggcgctcctgcttgctgtcggtacggctgcaacagatatgtctgtgtatgcagcagaaacgaaaacacaggaaggcacgacggaaaagaaaaagatcacaggatttgcagatctttcggacaacccgaaagagattcgtatgacaggtaaaatcagcctgaaccgcctgcttgccaagatgccgcagagcattgatgtttatctggatggcggcaaagagacaacgagtattccggtaacctggagctgtgtcggagactatgacacgacgaattattttgtctatgaatttgacccgaaatgggataccgatcagtattcacttggagcaggacaaaaggacaaaattccatacatcaatgtggtgatctcagggacaagtctctataaaggtgcagccatttctcaggatgagaaaaaatccaacgaaaaaaaagtatataaatttgcgaaaagaaagctcaaattaaatacagcagcggcctgtggtgtgcttgccaatattgagagtgaatcttcttttaacccaaccataagcgtcattgataccaacggcaagatcagttatggtatctgtcagtggaatgcttcgagatttgatgacctgagaaactactgcagcagcaatggttatgattatacttccatcgacgggcagcttaagtttttaaaatacgaactggaacattccgagaaatatgcattttccaaagtgaaaaatgtcgaaaacactgcagacggagcctatacagccgggtataactgggcaaaatattttgagcgctgtaacagtgtatattttgaaggacgtgcgaaacgcgcaagagatgtctactgggcaaaatataacggtgacagtccagatgatccggataacccggataacccggacgatccggtaacaaagaaatataccatcaaatatgtactctatgatggggaaaatagcgatgccaatccatcgtcttataagatcacaacagaaacgatcacattgaaaaaagcaaagaaaaaaggttatacatttgaaggatggtataaggagagcagctttaaaaacaggatcacaacgatcccgaaaggatcaaaaggcaaccttaccatttatgcaaaatggaaagcaaataaatataccgttcgctttcatggaaacaaggcaaccagcggcagtatgcaggagatgaaaaatctcgaatatgatatggattatacccttagaaaaaataaatttaaacgcaagggatataaatttgtccgctggaacacaaaggcagatggaagtggaaagaaatacggcaacaaggaagaaatcgagaacctttctgcaaaaaacggtgcagttgttgatctgtatgcacagtggtcaagggatacttacaagatcacttacaaaacgaacggcggagaacttgcggatggtactgcaaagaaatacaacgtagataccagaacgttcaaattaaaaacaccggtcagatatggctatacatttaaaggctggtataaagacaaaaaatgcaccagacgtgtcacacaggtcaaaaaaggtacaattggaaatctgaccttttatgcaaagtggcagatcaataaatataaaatcaaatacgatggaaacggcgcaaccagcggttccatgaaaggtgtctctgtctgccaatatggcaagacctatacgcttacaaaaaataaattcaagcgcacgggttatgtgtttgagggctggaatacaaagaaaaacggcaaaggtgatttttatgaagacggagaggatatccgtaatatcacagcgaaaaacggtaagacagtcacactgtatgcgcagtggagcaaaaagcagtacacgataaaatatgtacttgacggaggaatcatttcgtctgaaaatccgaccggctactattacgacacacctacgatccagcttgcagcagctgccaaagaaggatatacctttaaaggatggtatacggattctgcatttaaaaacaagatcacgaagatcaaaaagggaacccgtaaaaattacaaactgtatgcaaaatggaagatcaatacttacaatatcgtgtttgacggaaatggagcaaccagtggttcgatgaaatcgatcagttcctgcaaatacaatacaagctataaactctctgcaaacacattccagagaaatggatataagtttatcggatggagtaccaaagcggatggcagcgatactttttatggagatggtgcaacagtatcaaatctttcccttacaaatggagcaacagtaaaactatatgcacagtgggaagctttgtaggatgacaaaaatgaaattttatttagcaccgatggagggacttaccggttttgtgttccgaaatgcatatcagaaacattttggaaatatagatacctattttacaccattcatcaataataaaaagatgaattacaaagagatcaaagacattctgccggaacataatgaagggatgcatgtggttccacagattctgacgaatcgtgcagaagattttctggcaatcgcaaaagagttaggaaactatggttacgagagcgtcaatttaaatcttgggtgcccgtccgggacggtcgtggcaaagcaccgcggcgcaggatttcttgcggtgccggagaaactggatcattttttagaagagatctttgcggaatgtccgctccggatctccgtcaaaacacgtgtcggtgtcaatgatgccggggagtgggagcatcttctttccatctatgaaaaatatccgatggaggaactgatcattcatccgcgtgtacagaaggacttttataacaatactccggatatggaagcgtttttatatgcggtggaaaacagcagacatacgctatgttacaacggtgacatctgctccgtggaggattaccggacatggagacagcagatggaagagaaaagggaatgtgcttttatgcaggaatccgggcatcagacggatccggaggacactggcagcctggtgtcccatctcatgcttggaagaggagttttaaaaaatccgggtctgatcggagaactcacaggacatgcgccgatcacaaaggatcagtttcatgcgtttcatgatgacatattaaaaggatatctggatgtaatgtcaggggagcgcaacacgctgtttcgtatgaaagagctgtggttttattttgcaaaatattttacagaacccgaaaaatatgtaaagcagatcaataagacacagcatgtggcggagtaccgtgtgattgttgataatctgttccgcgagcaggaatgggaacaaaaataaaaagtaaaatattttataaaaaagtaaaataaataattgtaaaataaaaatgattttgctattgtagagttagatatcatacagaaatggaggagccgtatgagaaaacaaagcaaaatcattttttatgcaggaattgtattggggtttgcagcagtgcttacgggggtggcactgtcggggggcaggaagataccgaaggattttacagtgagttatgaaggaatcaaaacggcggatattacggcgggcgtcagtgtacatgatccatccgtgatagaggtggacggtacctattacattttcggatcgcatatgtcaggggcatcatctgaggatctgcggaactggacatcaatcggtgacggatatacgcagtcgaatccgatctttgatgatctgcttggaacagagcatgtatttgattatacgggaagcagagactctgtgataccgactgacgatgggacttatcatgtctgggcaccggacgtggtctataacagggcacaggacttatattacatgtatttttgcacgtcttcgacctggaatgcatcgaatctgtgttatgcggtttcagataaaccggaaggaccgtatacatggaagggagcgctcatctattccggatttacaaaagatacgatcgaggcgaccgatgtgctcgattatgtggacatcgactatgcaaaaaagaactacatcatggcgggaaataaatataactatgagaaatatccaaatgcgatcgatccgaccgttttttatgatgcggacggaaaaatgtggatggtctacggttcatggtcgggtgggatttttctgttagagatcgatgagaaaacaggcctggtcatccaccccaaagaagatgaaaaaaacggtgtggatccgtattttggcaaacgtctgcttggcggcggacacaaatcgatcgagggaccttacattctctatgatgaggaaagcggatattattatctgtttgtttcctatggttccctgacgagagagggcggctatcagatgcgtgtgttccgctcaaaaacggtggatggagagtatgtcgatatgaatggggcatatccggggatgtgggatgacaatgcagcttatggcttaaaactttccggcaattattatctgccgggtcttaataaggcatatatggcgaccgggcacaattcagcttttgtggatgaagatggaaagaaatatattgtataccacacgcgctttgacaacggacaggaatatcacgagccgcgtgtacaccagtattttctgaatcaggatggatggccgtgtatgcttccgtatgcgacggacggtgagacgatcgcagagagcggttatggcatttcggaagtggcaggaacttactatgtgattgatcagggaacctcaattagtgccaggattgcacagccggtaaaactggtgctgatggagaacggaaacgtgtacggcgaaaacttagaaggcacctggagtatggagaatggcacctgctatatgacgctcacatacgggggaaaagaatataacggtgtattttgtcagatgaaagatgaagcaggcacggatgtcatgacattttctgctgttggagcaaatgagagtgtctggggcgttaaatattttgagtaaaatgaaagcaaagacgtgagaaacggcagacggagcataaaatacttgcaaagaactctttcccatggtaatgtggtacgtatctaaagttttgggaaaggaacgggtacaaatgttaaaagcgattgatgatttcgtctggggagttccactgatcgtgttgatcttagcggttggtatctttcttacgatccggctgcgtggacttcagatcacgaaactgccacttgccataaaacatatggtggcaaatgaaaaaaacggagaacacggggaagtttcaagtttcggcgcactctgcacagcattgtctgcaacgatcggaacaggtaacattgtcggcgtggcaaccgcgcttgtcgccggaggaccgggtgcactgttctggatgtggatcgcagcactgcttggaacggcgacgaaatattccgagtgtctgcttgcaattaaataccgtgttgtggcaaaggacggtcatatcgtcggaggaccgttttattacatcgaaaacggaatgggtgaaaaatggaaatggctcgcaaaaatttttgcatttttcggtgtcggagtaggtttacttggaatcggaacttttacgcagatcaacgggatcacaagtgccgtgaacaatttctttgatccgcagaatacatggacggtggaactgtttgacagaacctattcctggacggttgtgatcgcaggtattattctgacactgtgtgtggcactggttatcattggcggtattaagcgtatttccacagtagcacaggttgtggtaccttttatggcactgctttatgtcgttgtggtactgatcattctttttacgcatcttagcgcaattccgggagcaatcgtagagatcgtgcagagtgcatttggacttcgtgcggctgcaggcggaacccttggatcgatcctgatcgccatgcagatgggaattgcccgcggaatcttttcgaatgaggcaggacttggcagtgcgccgatcgcagcggcagcggcaaagacaaatgagccggtgacacagggacttgtatccatgctgggaacgatcattgacacggtgatcatctgtacgatgaccggactttccatcgtgatcacaggagcctgggatatgggattagaaggtgtctctgtaaccacgaaagcatttcagataggactgccattcccggagcaggtggcatcttttgtgttaatgttatgtcttgtattcttcgcatttacgacgatccttggatggaattattacagtgaaaaatgtctggaatatctggttggggacaaaaagactgttttaaagggatatcgctggctgtatatccttgcagtgtttataggaccatttatgacggtatctgctgtatggacgatcgcagatatctttaacgggctgatggcattgccgaaccttgttgcactcgttgctttgagtggggtggtagttgcagagacgaagaaatactttgaaaaacagaaatattagtgagaaataaaaaatggcggaggcagagtgcttccgctgtttttttgcctggtgatgtagtctgcgttttttgattttagaaaagtatataatattttagtataatctatacaaaacaaaaaataaggagtatactgtcataagaaagaaacagtacgaatgtcatcagaggggaggatactgcatgtcagatgaaaaatctttaaagtacaatgaaccgtggattttacagcgtgcggatccatatgtttaccgtcatacggacggctcgtattattttacggcgtcggtaccggcgtatgacgggatcgtattgagacgtgccggaacactggcggaactttccggggcagaggaagtcatggtctggaagaaacatgagtccggtccgatgagttatcatatctgggcaccggagatccactatctgtttggaaaatggtatatttattttgcgggaggcgaggcggaagatatctggaagatccgtccatatgtgttagagtgcagcggggacgatccgctgacggatgagtgggtggaacttggaaagatgaaacgcgcagcggaggatgagttttcttttgaggcattttcgctggatgcgaccgtctttgaaaataaaggtgaatattattatgtctgggcagaaaaggtcggagtcggcaaaatgatttcaaatctctacattgcaaagatggaatccggtaatcagttaaaaacagtacagatacttttgactacgccggattacgactgggagcggaaagggttctgggtcaacgagggacctgccgtgatccatcatgacggaaagctgttcttaacttactccgcaagtgagacgggtgtggattactgtgtgggaatgttatccatcgatgaggatgcggacattttagatccgcgtttgtggaaaaaagagcgttacccggtattaaaaacctgtgaaaaactgggcatttacgggccgggacacaactcgtttaccgtggatgaagatggaaatgacgtcatggtctaccacgcacggacggaggcagaaattaacggagatccgttgtacaatccgaaccgtcatgcgatgcttatgaaggtaaaatgggatgaagccggaagaccggtattttcctatgaaaataaataaaaaaggagagaaaacaatggcaaaactgatcatcaatgaggaaaacaaaaagagtcgtattgagccggaaatctatggacatttttcggagcatctggggagatgtatttatgagggaatttacgtcggcgaaaaatcggagattccgaatgtaaacggcatgcgcaccgatgttgtggacgcattaaaggaattaaaagttccggtactgcgctggccgggtggctgctttgcggacgaatatcactggatggacggaatcggaccgaaggaaaagcgtaaaaaaatgatcaacacacactggggtggtgttgtggaagataacagtttcggaacacatgaatatatggaactgtgccgtcagatcggctgtaagacttacgttaacggtaatcttggaagcggaactgtccgtgagatgtcagagtgggtggagtacatgacctttgagggcgtctccccgatggcagatttgagaaaagaaaacggacatgaggcaccgtggaaagtggattattttggtgttggcaatgaaaactggggatgcggtggaaatatgacgccggaatattatgcaaatgagtaccgcagataccagacctatgtgcgcaattatcacccggaccgtccgatcaaaaagatctgctgtggtgcaaatgttgcagactattactggacaaaaggtgtgttaaatacggcatttgaccatgccgagcagtggcacggatttatggatggtctatcacttcattactatgtacatccggagggctgggagatcaaaggaagttctacagactttgacgcagatgtctggtacaagacattatcaaaggcactttatatggagacattgatcgagcgccatggtgcgatcatggatgagtacgatccggataaaaaagtcggtatgatcgtggacgagtggggcacctggtatacctgcgagccgggcaccaatccgggatttttgtatcagcagaatacggtgcgtgatgcacttgttgcaggtatcaccttaaatatttttaacaagcacagtgaccgtgtcaaaatggctgcgttagcacagatggtaaatgttttacagtctgtacttctgacagagggcggccagatgataaagacaccgacctaccatgtcatgcatatgtaccgccaccatcagggcgcagacctgttagagagcactttgaccggggcaggtgagatcggatcggatgagtggaaagtaccgaagatcacagagtccgtatccatggataaagacggtgtgatcaccgtcaccatgaacaacctctctgtggaggcatcggaaaaggtggagatccagcttgcaaaccgtggctatcatgtgactgaggcaaagatcgtaaccgattccgatatgcatgcacataacacatttgaggcaccggataccgtgacagaaaaagattttactgcctatgaggagacggaaaacggcgtgaatgtcacaatgccggcaaacagtgtgatcgagctgcgtcttgcaaaataagaaaaaactgtcagcaatggcgggaaaattagctgctggtcatactggaaatatgaacagtaacgaaaattacaggcggagatgacatatggcacagatctgtaaaaagtgtctgctgcgcgaaatggcggaagcggatgcaaaaatgattgagaaatataaagaggcgatcaaaaaagaagatcaggtatcagagagcgagtatgagagacggcttactgtctgcaaaacctgtgaacttttaaacgcgggaacctgcggtgcgtgcggctgctatgtagagttgcgcgccgcggcagccgtatcaaaatgcccatataaaaaatggtgacagttcagacggactgttaccattttttattgcggtaatattacttcatttcctccaccggggcgtacccgagactcactttgatatcctggctgtaattgccaaaagattttccaaagatcgtaagtccgccgacgtgcctggcatcgtcctccacagccaggcggaagcggatgctgctgtggcagttgagatggaaatcatcgattttaacgtcggatattttgagaccgtcgatataggtacctttttgattgatgacaagttgttttagcaatccgtactggttccagtttgcataccaccagtccggtgtcaacagacccttcacatcgccaaaatcgccgggggaggtccagtcaccaatatgaatatcatttaagtaaaaactgatatcggaaggccagtcattgttggtgcctggtgcttcggaactaagttctgcggaaattgtgatctgtgtgatttttttggaagccgggataaaatttggaatggcatattcaacataaccgcgtgtaaaccatagaatatcagcgttatagcggtccggatgttcaaaatatcgcggatcatccacttcaccgatcagggcatctgcagaggcaagtccgcaggtcgggcagatctggtaatttgtatagtgaccgacttttaattctgtatgataaacattctcgatttcggcaggcttttctaaatcgatcaggatcttatccaggtggatggaacagattttctggttgccgtgaacagcagattcactggatgttgtgatcagtccgcagttctcaagttttttgatatggctggttaaggcaccgtttgtaatatttaaacgggaggcaagttcattcatgctcatattgtcgttttccagcaaaatatttaaaatttcaattctcacatcagaaccgagtgccttaaaaagttctagcccttcattcaacgaagtgatgtgtaacaaggaaatcctctcctttcaaaatctgtaaaaatcacagaatgacacgttctaaactgtaatcattgcctgaaagtgtcaggattgcaagactttttgaatctccacgtccgtcgctggcactgcccggattaatataaactttattgaaacgttcataaaatgtatagtgatgagtatgaccaaagataagaaaatcagcatctgtcaggtcaaatggaagatcaaactgattatgaaccagaaaaaaagtcttgccgccaatgcggaactgtaaaaattcaggaagattttttgcccagtcaccgcggtcattgttgcctcggaccatataaagcggaatgccaaagttccggaaacagtcataatttttctgcgtacagaaatcgcctgcatggatcagataatcgcagccgtctaaatgacggtgccactcttcacggaaaataccgtgtgtatcagaaataatgccaattttcataaaattctccattcttgcgtgaaaaatgttattttcatactaattttctccattaagtaaaaaaataattagataaattatataggaaaaaagtatggaagtctagaagaaagaaaaatattcataaaaatacttttttattttaaagtaatgtagtatactgttcgggggatcaattagttaattttttaacgggagagggagaatggaaaactcggtattagaggaaaaggtttttcataaagttatgaaaaacataccgtttggtcttgttgtgagcagtgagggcagaaaacgcaaggtgtattatgtgaatacgatggcgtaccatatgctcggttacacgcgggaggaatttattgaaaaagtacaggacggctggagccggtttgtggatattgacttaagaatggtcatgagggagcatcatgaagagattctgacaggggagtcatttgagctgactgctcagacagagacgaaagacggaaataaaaagtggctgtcttttcgtgtgatggtatccatggatgttatatcctcgcagttaaaaccggtcagttatattacgatcacagatgtaacggagaaagtggaaaaaaacagacgttacgcgagagaaagagaatatttacgggattgtgcagccagagattccatgacgagactgttaaaccgtggtacgatggaagatcgtatcaaagaagaactggagtcagtggcagaaggacaaaattacgcatacattgctattgatctggataattttaagcaggtcaatgatgtgtatggccactgggttggcgaccgcgtcattatgagtgtgtctaatattttaagggaagtctacggtaatcaggtcagcattggacgtatgggcggggatgaattcgcagtatttcttccggatgtaaaagaccgtatgtggatacaggggcaggcagatgaagtgctgtaccggctgcgcagacaaaaagaaatgatcggaatggcggaggagccgacagcaagtattggcatcgcattcggccctgaggatggcacaagcttccgtgaactgtatcacagagcggatgcagcactctatcaggtcaaaaaggaagaaaaaaacagcatagcaatttacacaatgatataagttttttttggtacattttacctattgaaaaaatgaatcaaaaattataacatctaattgttatatgactgacggaaaaagtggaagaaccacatgaagtataacgtttacaatgccgaccgtctgggcgagataacccggactgtcggtttcttttattcttaaagatattcttcttacaggaatccttttgtatgaaaaaaagaacagttccggaaacgaagcggatattgacaagcagtgatgaaacatgatatattcactgcgttagaactaactaacaaaagttagaaatgactaccaatattttccagcaataccaaaatattgggggatcagatccgttttatacaggtaaaccatagttttcagcaaacaggaggaaaaataatgcaaaacgaatggagagattttaatggtggagcatgggagaatgaagtaaatgtcagagacttcattcagagaaattataagccatacgatggtgacagctcttttttggagggaccgacagaggataccacagcactctggcaggacgtattagagctttcaaagcaggagagagaggccggcggcgtgctcgatatggatacaaagatcatttccacgatcacttcccatggacctgcgtacttagacaaagataaggagaagatcgtaggtttccagacagataaaccattcaaacgttccttacagccttatggcggtatccgtatggcaattaaggcatgtgaagataatgggtataaagtagacccggaagtggtagaatatttcacaacacacagaaagacacacaatgcaggcgtatttgatgcgtatacaccggagatgagagcctgccgttctgcacatatcattaccggtcttccggatgcatacggacgcggacgtatcattggcgattacagaagaccggctctttatggtgtggatcgtctgatcgcagacaaggaagaacagttagaatccacacgtacgattatgtattctgacgttatccgtgagcgtgaggagttatccgagcagatcagagctcttaaaatgttaaaagaattagcaaagatttacggatgtgacatttcaaagccggcaacaaacgttcttgaggcaacacaggctgtttattttgcataccttgcagcagtcaaagagcagaacggtgcggcaatgagccttggacgtacttctacattcttagatatctatgcagagcgtgatcttcgtgaaggaactttcactgagaaagagatccaggagatcatcgatcagttcgtaatgaaactgcgctgtgtaaaatttgcccgtacgccggagtacaacagtattttcgccggagatccgacatgggtaacagagtctattgccggaatcggtgtagatggaagacatatggtaacaaaaatgtcttaccgttatttaaatactttaaacaacatcggagcagcaccggagcctaatatgacagttttatggtctgtaaaacttccggagaactttaaaaagttctgtgcagagatctcaatcaaacattctgcgatccagtatgaaaatgatgatatcatgcgtgtggttcatggtgatgactacggcattgcatgctgtgtatcttccatgaggatcggaaaagagatgcagttcttcggagcccgtgcaaaccttgcaaaatgtttactttacgcgatcaacggtggtgtggatgagatcagcggtaaacaggtaggaccgaaatatcgtccgatcacttccgagtatcttgactacgacgaggtatgggataaatacaaagacatgatgaaatggcttgcaggtgtctatgtcaatgcattaaacatcattcactatatgcatgacaaatactgctatgaaaaactgcagatggcgctgcatgacaaacaggtaagacgctggtttgcaaccggtattgcgggattctccgtagtagcagattccctgtctgcaatcaaatatgcaaaagtaaaaccgatccgtgatgagaacggcattactgtagattttgaggtcgagggagattttccgaaatatggtaatgatgatgaccgtgtggatgaaatcgcaaaagaggttcttcatacctttatcaaatatgtaaaaggaaatcacacctatcgcggtggtatcgcaacaacttccattcttaccattacatccaatgtatcctatggtaaaaatacaggagcaaccccggatggaagaaagaaaggtgttgcatttgctccgggtgcaaatccaatgcacggacgtgataaaaacggtgcggttgcttccttagcttccgttgcaaaaatgccatttatggatgcgcaggatggtatttccaacacctttaccatcgtgccggatgcacttggaaagacggaggaaagctctgaaacaaaccttgtggcactgcttgacggctatgcagaaaaaggcggtcaccacttaaatgtaaacgtattaaataaggaaacactgcttgatgcacagaagcatccggaggaatatccgcagcttacaatccgtgtatcaggttacgcagtaaacttcatcaaactgaccaaagagcagcaggatgaggtaattgcaagaacattccatgaactgatgtaaaaataaggagattattatgggctatattcattctctggaatcatttggtaccgtggacggtcctggggtgcgttttgtcgtattcttcgagggctgcccgatgcgctgccagtattgccataacccggatacatgggtgctgactgatggaaaacagatggaggcggacgagatcatcgaccgcttcctgcgcaatgcctctttttaccggactggcggaattaccgccaccggtggcgagccgatgcttcagattgattttctgacggaactgtttgcgaaggcgaaggtgcatggaatccatacctgtttagatacgtcaggtattatgtttccgggatttccggaggatggagaagccacatcagatatcacactggaaaaaatagacaggcttcttgatgtcacagatcttgtaatgcttgacattaagcatatccgtgacgaggatcaccggaaactgaccggacattctaataagaatattctggcatttgcaagatatttagatcagaggaaaaagccggtgtggatccgtcatgtcgtagttcccggcatcacatttgaggaggcagaattgacggaactcggacacttcctaaagacactttccaatatggaaaaattggaagtactgccatatcatgcacttggcaaggtcaagtatgataatcttggcatggattatgtgttaaaagatacaccgcagcttaccaaagaggaagcaaaaaaagcggaacagatgataagggatgcaatgtcataatggcgagtcattatgacattgcatcccttgttaaatgtgtaatattgatcgtgccagcgaatgatgcacatttttacaagaatattacaggaaaatataaatattctgaaaaatatataaaaaatgatatattgtattgaaatatttgtggaaagtgctataataaaaccatgatataaatctgtatcaaataaacggcaaaggggttggacatcatgagaatcaagattacaggaagaaacattgaattaaccgatggtatcaaagatgcagtggaggacaagttaaacaaattagagaaatacttcactccggacacagatgtctatgtaacactgagcgtagagaaggaacgccagaaagtggaagttacgattccaatgaaaggaaactatattcgttctgaacaggtcagcaatgatatgtatgtatcaattgatctggtagaagaggttattgagcgtcagttaaagaaatatagaacgaaactggttacgaaacagcagagcgcagcatccgttttcaaacaggatttcctggatgcagcatcagacgatgatgaagagatcaagattatccgttctaagaagttcgatatgaagccgatgtatccggaagatgcatgtgtacagatggagttattaggacatgacttcttcgtatttatcaatgctgagaccgaagatgtcaacgttgtatacaagagaaaaggcaacacatacggattgatcgaaccggaatactaaaatggatcattgcagaattgtgctgtgaatacaaagaacccaccctgcggcaagcaccttgccgccgggtgggttctttgattcataggattcttttcttggcagaatacatttgtgacagggagtcatgcgtcaaaaaacgaaaagccaccttttgacacacgagattcctgccttaagcattatggaaaaacgacacacagattgcccccggtcccgcatgtgtaccgatcgtactcccaattgtgctgattggcagctcttttgtctgtccggcccagagatctgcgctgtccgcaatatacttccggagcagtgagtcgtcgagcccgctgtagcctaacatatacggcatggaaaaatcgataccgtttttatttttcacttcctggatcaggatgttatttccgtttttcgatcctctggcctttcctaagatcgcaacctcacctttttcaatggcgatgacaggcttgatggataaaatatttcccgcccaggcggcagtctttgagatgcgtccgccctgttttaaatactcaagggtatcaaagacagctaagacacagacatctttctttttctcttcgagtttttcggcgatctctttcgcagaaagcccctcatcgcgcagctttacggcataaaggacaaggatctgttcgcccagacatacatttaaactgtcaactaatgtgatacagtcctcatagccatcaagcgcaatgtgtgcactttggtatgtaccggataaaagagaggacagacagatcacaacggcggtatcgccggcttcttttacttctttgaatttcgcttcaaaatcatgtggagatacctggctggtcgtcgggattgttccacattcgatcagtttttcataaaattctttatgggaaatggtaacaccgtctaaatattccgtttcgccaaaaattgtctttaaaggcatataatcaagatttaatgcatccgcacgttcctttgtgagatcagatgcggaatcaacaataattcgtacactcatttttttccctccggataaaatagtttgactatcaaacaaaaataaatataaagtatgatgaaaagaatgtcaagatattttgattatcaaaatattaaaacaaaaatcaaatgtagttgacaaaaatcgacagacataagatacttgtgtagtatcaatgcctgcatgacagtagtgtaaaagtggaaaattatataacagagcagaagaaagcggaagaaatgtataacggggcagagattctggtggatctcgcaagaaggtatccggaactatggaatgaaatagacaggcagtgcactttaaatagagagcggtatggattgctctgtgaaatattgctggcgggggacgaggaacgctgtgaggatgtggttgcaaagatataccggtacgggagtatgatcggaaaacaggatctgattggaagacagatatttttgtggctgctgcaggcactgaggatggaagaaatcgcaatgctgtagaaatgggttttatcgtgaaagaggccagcagcaggcaaagaattttatgagtcaggaatcttttccggtacgggaaaacggggaataaaagaaaaaatggtgcctgccgggggcattgccgtgaggcagaaaaataaataagaaaggatgtcatgcaggcataaaaagtacaaaggaatgtgcaaattccttgccacacaaagaaaaaaggtatactataaagcagaaatgtttttatgagatagtaaggagagtataccatgaagattgttgttttagcaggtggtttaagtacagagagagatgtttcctttaagaccggagatatggtggcaaaggcattgagagagaatggacatcaggtaatcttacttgatgtatttatgggatacagtgataaaaaagaagatctgacaggtatttttgaccggagtgaggaagtcagtgtaaaagtatccggaataccggaaattgcaccggatcttgcaaaggtaaaagcatccagaaaagatcagtcagacaatttctttggaccgaatgtgatcgaattatgccagatgtccgatatcgtttttatggcactgcatggagaaaacggagaaaacggcaagattcaggccgcatttgatctgtttggcatccgctatacaggaaccggttatttaagcagtgcgcttgccatggataaggagatgtccaaaaaattatttttgtcagcaggcataccggctccaaagggcgcatccatgaaaaaggctgactgcagcgacgatatcacaaaacttggcattcagttcccgtgtgtggtaaaaccatgctgcggaggttcgagtatcggtgtttccatcgcacacaatgcggaggaatataaagcagcattagatgaggcgttccgctgggaagaaaacctgatcgtggaagaatatgtaaaaggacgtgagttttctgtcggcgtgatcgcgggaaaagcacttccgatcatcgagatcgcaccggtacagggattttatgattataagaataaatacaaagcaggcagtgctgttgagacctgtccggcagaactttcagaagctgttacagagaaaatgcagcattatgcagagcaggtggcacaggtacttggattagatacctattcccgcaccgattttctgttggatgaaaatgaaaatatctactgtctggaagcaaacacattgccgggtatgactccgacaagtcttcttccacaggaggcacaggttgtcggtgtgaactttaacgaattgtgtgagaaactgatccagatttccctggataaatatgagaaataataagatatttttgtaaaagtaaaagcaaaacgaatcccgggaaatgaggtagatcatgaaaaacatgacactggagcgtattacggaagtatgcggtggagtatattatggcagtgaggccgacaaaaagaaagaaattgcgggagctgtgatcgacagcagacaggtagagtcaggatatctttttattgcggtaaagggagaaaaggtggatggtcatcagttcattccacaggtgtttgaaaaaggtgcacttgccgtattatccgaacaggaactgtcagaaccggcgggcccttatatcagggtggaatctacacttggtgcaatgaaaaaacttgcggcatactaccgcagaagtcttgatattaaggtcgtcggaattaccggaagtgttggaaaaaccagcacaaaggagatgatcgcgtcggttctttcacagaagtataatgtgttaaagacagagggcaatttcaataacgagatcggtcttccacttacgatttttaagatcagggagcagcatgaagtggcagtgcttgagatgggaatttcagaattcggtgagatgcaccgtctggctgaaatggcatatccggatatctgtgtgatcacaaatatcggattgtgccatctggaaaacctgctgaccagagatggaattttaaaggcaaaaacggagagttttgagcacctgacaccggaaggaactgccgtgttaaatggagatgatgataagctctgtgagaaaaagatggtgaacggaaaaccggtggtattttatggtatcggaaaagaagcaaagcttgcaaagacagagcagggtgaaaaatatcttgccgaaaaggaagtatatgcaacagatgtggaaccggtaggattagatggaacaaaagcggtgatacatattggtgcagagagctttgcagtgacgatcccgattgcaggagagcataatgtatacaatgctttagccgcagtctgcgttgcaggaaagcttggacttagtgtggatgaaatgaaacgcgggattgagtcggtaaaaacgatcggaggaagaagtaatctgatccacaaaggcgggatgacgatcatcgatgactgttacaacgcaaaccctgtttccatgaaggcgtccatcgacgtgctcgcagcggcacctggaagaaaaatcgcagtgcttggagatatgggagaacttggcgaaaatgagcaggaactgcatgccatggtcggagaacatttcgaaggaaaaggaatcgatgctttgtttgcagccggtgcattatcagagaatctggcacaggcagtaagaaaatgcagtaaggagacggaggttcattacttcaaaacaaaagatgagctgatggaagaattactgccttatgtaaaaagcggtgacacggttctggtaaaggcatcccactttatgggattcacggaggtcgtaggacagcttacaaagtaagaaaatgtagtgaaaatacgaagctatgacagcttataaatgaataaaaaagaaaatccccggatcacggaattggtgatccggggattctattttaattcataggaaattacgtcctatgaattaaaaagccctccgggcgggatgcgcatctcgcggagtagaagttagctgtaaacagcaccgctcgagcgcgaaagagtcgcaagcgacgctttgttccagatcttaaatctgcggattatttttctcgagcatttcagcgatcacaccctgacagtgcgaaccgagttttttgcgtgtatctttgtctaaagatttcgggtcgattggtttgccgtattctacgatgacatgtaccggttttacctttggaaaatgtgcttctaaaatatcggcggagccggaaattgccataggtacgatcagacatccggttttttctgccattttaaaactaccctctttgaatgggagcatcagatcctctgtcttattgcgtgttccctcaggaaaaatacacatcgaaaccccgtttttgatattgtcgattcctgcaaggatcgtttttagcgcttctttgacatccgaacgattgatgaacagacagtgcagtctggtcatccagacagataaaagaggaacctttttcatggaatcttttgctacataaccggtcaggcgcggacagcgtgagtaggtgatgatgatatcgaaataactcctgtgattgccaatatagagaacaggctggtcttttggaacattttcttctccgataatggtaagtctggtgccacagataaacagaatgacacgaaatgcccactgcaccatgcggagctggctgatatcagcagcctgacgattgaattttccgatgatccattcaacaaaaaggacaggaataccgatgatcaggtagagtatagcaaaaagcaatgcaagtattgcgcgtaacatagtacgtcctttccggggagatcccccaagttttatatacccacattatatcgggtatctatgggaaaaacaactaaaaaagacatatttaaagacagggaggcatatattaagatagaagcgaaaactgggggcaggtgtagtgaaacatgtttcgaaagtatctggtaaaaatatgcgggatcagtctgctgatggcaggactgatcagcggatgcagtattgagcagacaaatgaaacaaaagtcagtgatcttacatatacgatcgttgaggaatccgagacaccggaagagttaaagacaatgatcgaggaaaagaaaacggcggattttaaacttacctatgagatggcggatgatctgtatatcgtgcggggatatggggagcaggcgacgggaggatacagtatctgtgtgagggactgttatctgaccacaaacgcagtagtgtttgatacagaactcatcggaccgagaaagggtgaagttacaaatgcgagtccaagctgtccttatattgtaatacaggtaaaaaaccaggacaaaagtatcatttttgagtaaatattcttaaaatttttttaaataatttaattatgtttgacaaaaatttagcacagtgctattctaaagcggaaaagaaattcggtggaaacgatcattacgatgataaacgatcgcgagatgccggattaaggaggtagaacacatgcaacaggcagacatcagaaaagttcgggcatccgtgcatcagcagtgcgggaaaaaagtaatgattcagcttgaccgaggacgcaataaagttgacatccaggaaggcgtcatccagaatgcttacccaagcgtattcacgatcctggtaaatgatgagcgtgaagaaaatccacctcagttattatcattcagttattctgatattattacaagagatatacgcatgaagttgtgctaaacaggtataaaatcctccatgtccgaataagatggttacaaagattcggaatgggggactttttttggaatttcagaaaataaaattacatagaagtgaaaaaaacagagctgcagtcacacagatcacactggatgatgactataatgtaccggattacagacaggatatcgtaaaagtcataaaagaacgcggggaactgcgctttgatgaggtaaaagcgatggagggggctgcatggatcaagggcagtctggtttttaaggtgctttaccggagcgataagcaggaaggaaaaataagctgtctgcgcggtgagattccttttcaggaacggcttaacatggatggtctgagcgaatatgatgcagttcatgccacaggggatatggaagatcttacgatcggagtgatcaattcccggaagttaaatgtccgcgcggtcattgttttgacggcatcgtcagaaaaagaagtggatgaggagctgacctgtgaactctcagatggcagttcctatgaacagaatattgtagagaaggaagcgttaaagctgcttgtggtgcgacgtgatatctgcagacagaaaagtgaggcagtgctgccgtcgagtaaaccgaatatccgtgaaatactctggcagagtatgcagctgcgcaatgttgaaagcaggcttgtggaaggaaagatcagactttccggggaaatactggtttccatactgtataatgatgaggaggaaggggagcatctgtcctggtatgaaacgacagtcccgctggatgcacaggcagagtgcggtgttatggaggatgactgtatctggcaggtgcagatggtacctttgacaatggaactggaagtcaaacaggattatgacggggaagaaaggatccttgtcatggagctggcattagatacacacatccgtatctggaaggaagaaaagataagacttttaacagatctgtattcactgcagaaagaggtaaaaccagtcttccgtgaatgcccgctggagcgtcttctggttaaaaatgctgcaaaatgcagaatgacagaacagatggaattaaaagaagataaagaaaaagttcttcagatctgttcctgtgagggaaaagtgctcttagaacgtcaggaaataaaaccagatggtgttcttgcggagggaacggttgaggtcaatattttgtacattacaccggatgaccatatgccggttggagcagtgcaggaaatttatccgttttcacagcttgtggagattccggaaatgtcagcgcaggcgaaagtggagttagatgcttccttagagcagctctcagcggtgatgcttgatcaggaacacgttgagatccgggcggcagtacggctggatctgattgcctttgtgcaggaagtcatacagaatatcgaggaggccacagagtcggaaccggatcttgagatgctcaggaacaggccggggctggtgggctatatcgcaaaggcaggagatgatctctggacgatcgccaaggaaaatcatacgaccatacaaaatatcatggagacaaatcacagaaaaagtgaggtacttctggcgggcgaaaaggttttgatcgtaaaacaggtcggataaaatattaagtatttgtgaatttctggaaatcctaacaaacatagatgaaagtgtgataaaatatataagtacggcttctgcccactgcagcctgccgtgcttatttttgattcgtaggaaattatgtcctattcttttataaatgacagaaggagaaatgcttgatgaagtgggaaaaggcattaaaatatacaagaaaacataaaagaatgatcgcagtgatgatggcaggtgtgatcggatttgcgtgtttttactctgcagatgcatccgtgataaaagatgcgaagaagaagaaaaatgaggcgcagcagaatttagacaatatcaaccagcagatcaataatatacagagtgagcagagcaaggtaaaaagccagatggcggcgtatgatgaacagctgatgtcgcttttgaccgatatggaactgttgaaaacggatattgataataaggaaggcgagattgatcaggcaaagacggatctcgccgcagcacaggaaaaagaacagcagcagtatgcagatatgaaaaaaagaatccagtacatgtacgaaaacggagatgacacatttctggatgcacttgtggagtcggaagatatctcagaccttttaaatcgtgtggagtatgtatcggaagtatacagttatgacagggagcttttagtggcttatcaggagaccgtacagcaggtggcggatttagagtcacagttagagcaggaattagcggatatggaggagctgaaacaaagttatgatcagcaggaggcttccctgaatcaggttattaatgaaaagaaggcacagattgcagattttgattcacagctttcaaatgcaaaaacactggcaagccagtacgcgtccacgatccgcaaacagaacgaggtgatcgcacaggaacaggcgcgtcaggaaaaagcccggaaagaagcagaagagaaggcaaagaaagcggcgaaggcaggcacaaaaaccagtaattctgccacaacggcatctacggacagcggaacaacagacagtacagggggaagttcctcttccaataatacagcttcaacggacgattccgacaacagttcttccggcagcagttcgacaggactgacaaataacggtttaaatccatcctactctaccggtgtgagtggcagcagtgtggtatcctatgcgacaaattttgtgggaaatccgtatgtgtttggcggaaacagcctgacagaggggacggactgttccggttttgtatcccttgtatacagccattttggcgtatcacttccgagaagttcctatgcgcttcagtcaagcggacaggctgtcagctatgagaacgcacagccgggagacattatctgttatccgggacatgtggcaatctatatgggaggcggcaggatcgtccatgcatcaacgccgtcgagcggcatctgttatggaaatgcgacttaccgtacgatcacaatggtgcgccgtgtgctgtaagggacactgatgataaaaatgcagcaatagatattgaaaaaaatttatgaattatatggaaaatatgctataatcagagggaattattagaatcaggaaggtaggatcgttatgcagtttgaaacattacaaaaagatatgatagcagccatgaaggcgagagataaagtacgcaaggatgcaatctccacacttgtttccgcagcaaagaaagctgcgattgatgagggatgcagagatgacatcaaagaagaactggtgaacagagtaattttaaaagaaatgaaatcagtaaaagagcagattgatacctgccctgcaagcagagaggatcttttggcagaatatcagacaagatatgatatttttgcagaatatgcaccacagatgatgtcagcagaggaagtagaagcatatattacagagaagtttgccgatgtggcagcaagtaaaaataaaggacagatcatgaaagccgtaatgccggagttaaagggaaaggcagacggaagtgtgatcaatcaggtggtgcagaaattatgtcagtaaaaatcggtagaaatgatccgtgctggtgcggaagcgggaaaaaatataaagcatgccatcaggcatttgatgagcgcatcgcaatgatcgcttcacagggacacatcgttccgacacatgatctgatcaagaatgcagatcagatcgcaggcatcaaggagagctgcaagatcaatattgcagtgcttgattatattgagaagcatattcatgagggaatgaatacagcagagatcgataagatcgtttatgatatgacaacggagatgggcggtattccggcaccgctgaactacgagggatatccgtacagtgtatgtacttccgtcaatgatcaggtatgtcatggatttccgtcaaaagatgtgatcttaaagtccggtgatatcattaatgtggatgtatccacgatcttaaacggatatttttccgattcctcaagaatgttctgcatcggggatgtaagtccggagaagaagcgccttgttgaagtgaccaaagagtgcgtggagcttggtttgaaagaggtaaaaccgtggggatttttaggcgatatgggtcaggctgtgcatgaccatgcgtttgcaaacggctatacggtagtgcgcgagatcggtggacatggcgtcgggcttgagttccatgaggaaccgtgggttggctataataccaaacgcggacaggaaatgctcttagttccaggcatgatctttacgatcgaaccgatggtcaatatgggaaaagtggatatttatgtagactctaaaaatgactgggaagtttatactgaggacggacttccatcagcacagtgggagattatggtactggtgacggaagacggtcatgaggtgctctgctggtaaaattcaggatttgtgaaataatggatatttcccaaataaaagtgcctgtaaagcttcatcgtggcagcggataacgtggcggtagatcacgattgctgagatgataaaacagccaagccgtatggaatttaccgggacaaacaggaacacggtcagcgtaaacagtccgtatgtgatgacagaccggaaagaatgcggacgcagtgtgagtaccagtgagaataaaatataataaaagatcagacagaataacggatggatttccggaaacagtccaatcataactccgaaagagacggcaatcgctttgccgcctctttctttttggaaaaatggaaaagcgtggccgaataccggagctgccatgacaagtgcaaacagcatggaatcccggtctaagatcctgtctgcaagaaaaaccgggacagcgcctttgaaaagttcacagagcagggagagagttccggcaaaaaagccggcctgcatgtaggcatttgcaacgccgggattgtggtcggggggaacttttgtgatgtcggttttgaaaaataatcttggaatccagtaagcaaacaatgtactgccaagaacgaatccaagaaggataaaaagaaaatacgtcatagtttctccagtgtttttataatgtgcacggcagcgtcaggtttcccgttttctttctgggccagaagcatttcttcgcgaagagaacgttttccgtgcgtatcctggttgtcagagagcagtctttttccaagtgtgatctgtttggcaatgtattttgaggagacggaaagatgtctttttacaaaaaaattgcggtttgcagtctcacatccgggaatcggtgccgtgtgtacgatcgggatccgttttactaacgcttcggtggaggtaagtccgcccggtttggtgaaaatcacatcacaggcatccatatagtctgcaacccggttggtgtagcccaaaatgtggacgcgcgggttattttggaactgtttctgcagcacggtataaatacgtttgttattgccgcagatgatgaccatatgctcgccggattttaaacgcagtgaaagctctgccgcgaatatggcaagttttccaaatcccatactgccgctcatgaccagacagatcggaacaccctgtggaagatttaaggcattgcgcgcgtgcatctttgctaggatgcggtcctctgccggagaaaatgcgccactgacaggaatgccgtaagggtataacctgtcagccggaattccgcggtgtacatattctgagacacagtcctcgtggggaagaaaatatgcatcaaggtccgtttcttcccagaacggaatacaggtataatcggtgccgatagcagctgcgggaatctgtaacatgccttttttcttcatgtatgtcattgtttctgccgggtaaagatgcggcgttacgatgatatcataatcgtgctggcttaaacaggcagccagtttttttgccatcagtgcattggcatagtagaccggtgatttgtgtttattgcttgaaattgccatgccgatcttatagagcatgccaaaggcatgcggcatatgtttgacaagttccacataggcaccgcctactgcatgtgaagtttttttcccggagagcaggaacatatcaagcatgtcggcggtgtgaccgcaccggatggctgcttcccggatcgcttttccggcggcattgtgtccctcgccggtattacaggataaaattaatattttcatagataccagtgtagcataacccgagcaaaaattcgatacctgatcgaaagatattgatttttcactggaaatattgttaaataaaggggatttgtggtacgggaggtaaggttatggcgacgatcaaagaaatcgcaaaagcctgcggtgtgtcggtagctaccgtttcgaatatcctgaataaaaagccgggggcaagcgaagcgacaagaaatcttgtgttaaaaactgcaaaagaaatgaattatatgccaaactatgtggcaaaaaatcttaaggcacgcaataccagaagtatcggcgtcattgcagaggatatgacgatattcagtattccggatattattgacggtattacggaatattgtgaaaaggtaaaataccagattcttctgaccaatttaagattgtataaaaaatataatgactattattatcacagaacagattattatgggctggtggacgaggagatcaggaaactgatcgcaacgcaggtggacggtatcatttatgtgacggcacatgagcgtatcatgcactgtatcccggataatttaagtattcctgccgtgatggcatatggttatacggagagtaaaaacatcccgtccgtagttgtggatgacgagcgtggtgcatacgagatgatccgttatctgatcgcacagggacataaaaaaatcggagtgatcaccggaaaagcagacagccttcatgcgcaggcacgtctgatcggatatcagaaggcattgcgggatgaggggcttttatatgatccggaactgatctactatggagactggggaagagaatccggacataccggagcagaagtgcttttaaaaaaacaggtgacggcaatattctgcatgaatgatcttatggcaggcggatgttatgactgggcagatgagtcggggataaagataccacaggagatatctgttgcgggatacgataacagagaactgtcaagttattataagccgccgctctccacgacggagctgccacttcatgatatcggttacagggctgccgaggttatgatcggcctggtggagaaaaagccaggcgagacggcagaaccgcaggtctataaagttccatgtaagcagctgatccgccagtcgatcaaaacattataaaaataaaccgtgatgaaccgcctctgatgtcaggcttttgaactgactcagaaggcggatttttaatttataggaaattatgtcctatgaattaaaaatccctccatgagtttatttgtgaacagaagaagtatttatgttcattatttttggagaatatgtactatttgtgcaacattcacatggttaaacgatttaaaaaataataaagttgtgcgaaaaagcaaaaacttagaaagaaacagaaaacatgagaaaataacataaaaacaaaagaatatatatagataaatgaaaaataacaggctttaattatagcaattagtatggtatatataaacaagaacgaaacagaaatcaatcagaataacaaaaaaaggcaaaagtatttcagaataaagaaaaaaatatgaatgaaatgtaaataaactgaaaatagaaattttgatctgattaaacgtttaatatgacacatgacagacacatgaaggagggaggaagttatggagaaggaaaaactgacagatgtgccgctgcatcagatccagattaaagatgcgttttgggataaatacatccgcttagtaaaagatgtcatacttccttaccagtggaacacgttaaatgacaatgtaaaagatgcggcgccaagccactgtatcaagaactttaagatcgctgcaggcgaggcagagggagattttgaaggagctgtctttcaggataccgatgttgcaaagtggttagaggcagttgcatttaccttagattcatctggaagagatgaaaagttggaaaaacttgctgatgagacgatcgacctgatcgggaaggcacagtgtgaagacggatatttaaatacctacttcacgatcaaagaaccggacagacgctggacgaacctgaaagaaggacacgaactttacacggcggggcacatgatcgaggcagcagttgcatattacaatgcgacagggaaaagaaagttcctcgatattgtttcaagatttgcagacctgatctgtgaaacctttggaccggaggaaggaaagtgtcatggatatccgggacatccggaagtagaacttgccctggtaaaattgtaccgggcaaccggacagaaaagatatttagatcttgcgaaatattttatcgatacaagaggtgtgggagaaaattattttttccaggaagaaaagaaagaaaaatatcagcagatatttcctgaatttgccggatatgtaccggagtattcccagtcacatctgccggtcagagagcagaagacagcagaggggcatgcggtaagagccgtatatctctacagcgcaatggcagatctggcatatgaatatcaggatgagacattattagatgcctgtaagacactctggaataacatgacagagaaaaggatgtacatcacaggcggcattggttcatcgggattgttagagcggttcacaaccgactatgatcttccgaacgacagaaattattccgaatcctgcgcatccatcggacttgcgatgtttggaaaccggatggcgcagatcacaaaagatgcaaaatatgcggacattgtggagaaggcactttacaatacagtgcttgcagggattgcgatggatggaaagagtttcttctatgtcaatccattggaggtatggccggataactgcatcgaacggacatccatggagcatgtaaagccggtcagacagaaatggtttggcgtggcgtgctgtccgccgaatattgcaagaacacttgcttctttaggacagtacatctatggagcagatgaaaatagtttatacattaatttatacatatccaatcagacaaaacttctgattggagagacagagacagaagtaataatggaaagcagtttcttaaaggatggaacggtaacggttcatctggaatcagaaaaagcttccaaaggaacactggcacttcggattcccggctacacaaaagaatttaccgtgtggcgcggaacacagaaaatagaaacaccgctcataaaaaaaggttatcttatgataacggatcttgcagcatctgaggagatcaaaatatcctgtgacatgaaagcaagatttgtatatgcaaatccgaaagtgagagcggatgaaggaaaagcatgtatcatgcgcggtccattggtatactgcctcgaagagacagacaatggagaaaacttaagttccttatatgtggatacaaaagaagcgctgactgaaaactgggaggaacagttgttaggtggtgtgatgtcagtggaagcaaaaggaaaacgcatcttagaagatcattggacggcagaagagttatacaaagaacagccgccggagttaaaggatgtgacgttaaaagcagttccttactgttactggggcaaccggaaaacaggggagatggcagtctggatcagacagctgatctgacagaaaaacatgtatcacacggaagatcatctgaaaacaggagatactttcgatctgataaagaaaaacatttgggaggtaaatgtatgaagaagaaggttttagcagcattaatgtgcgcagcaatgacagtgggaatgcttgccggatgtggcggtaattccacagcaggaaacagcagttccgatgcgggggaagcagcatccggtacagagagcgcagacagcggcgcaggaagaagagagatggatgtagagggcgatgatgtcacaacacttgaggtctggacattcatcgagaaccatcaggatttctacaccaacatggctgagaaatggaatgaggaaaatccggataagaaggttaaacttgttttatccaacatggcatatgatgatatgcacaacaaattatcacttgcattagagtcaggagagggtgctccggatgtcgttgatatcgagcttggtaaattccctgcattcatgacaggtgatatcggattaaaaccattgaacgatgcagtagaaccgtatcttgacaatgtagtagagtccagattacagctttactccaaagatggtaactattatggattcccgacacacgttggtacaaccgttgctttctacaacacggaagcattagaggcagcaggtattgattacacaaccatcaagacctgggatgacttcaaagaagcaggtgcaaaatacaaagaagcaaccggaaaaacatttgcagcatgtgagacaactgctcagtggacattaaacttaatgctcgctcagaaaggcggagattacttaaatgatgatggaagccttgcagtaaacaatgataccatggttgaatgtttacagaccatgaaagatatgcaggatgcaggtgctatggacgttatcgccggtggacagcctgacaacgaggaagcatatccgttatacaacagcggtgatgtcgcagcagcaatcatgccattctggcagaccagccgttacttaagctacatgacagacctttccggtaaagttgcaatcgcagcacctcctgtatttggtgacaacgatgcagtaaagaccatcggtggtggtggtaccggtacagcagttgtagcctccagcccgaatgctgaccttgcagcagaagtattcgcttacatcaaactttctgacacagcaaacgtagaagtttggaacgtattaggatttgacccggttaacacagcagtatggacagacaaatccgtaacagagaacccggataatcagtatgtacagtacttcaacacaaaaccatttgatgcattattagatgttcaggacggcattggattactgacctgttatacagatgagaagatgccatccatcaacaatatcttctgtacagagactttgaataatatcttcgagtccggtatggatgtaaaagaagcgttagacgaggcacagtctgcacttcagaatgaatttggagaataagagacaggtttaaacaggcagggatgtggggcagatgtcctgcatcccgtttcctgttatgagggaaaagggggcattacagcatgaataaagtgaagaagtttttgtattcgcaaaaagcagcaccttatgtgtttattcttccatttgttctgacagtcattttgttttgggtattcccgatcgcaaatggtgtactgttaagttttcaggacgtcctgaaagataaatgggttggaatgaacaactataagagattactctctgatacatatttcagaaaagcagtctggaacagttttaaatacatggtgggaacactggtacttttaattccgtttccaatgttatttgcaagtatgttaaacagtaaactgatgaaggcgaagggatttttcaagtctgtttattttatcccggcactgacatctgttgtcgttgtaggtacaatcttccgtctgatgtttggtgagatggatacggcacttgcaaaccagattttaaatttctttggacattcttccatcaaatggctgaaaggtgaatggaccggatactttgcacttctcctggtagcgtgctggcgctggaccggtgtcaatatcctctatttccttgcagggttacagaatatctccacggatctctacgaggcggcttccatcgacggagcgacaaagtggcagcagtttaagagcatttcagtaccgcttgtaaaaccgactacgatctatgtattaacaattagtatttatgcaggactttccatgttccttgagtcttacatgctgtggaaaggtaataactccccacagaatatcggacttacgatcgttggttatctgtatcgtcagggtattgaaaaacgtgcaatgggatatgcatgtgcagttggtttagtacttcttatcattgttatgatcattaatatcatccagcttgcattgaccggaacatttaagaaggaggagagataatatggcagcagaatctgttggaatgagccagaaaaagaaagacagggcagcaaccatcggtatgatcatatttttttccatccttgcgatccttaccgttctgccgatctatctgttggtattagccagttttaaaccgggaaacttcctgcttcagtatggattaaatctgaatctggatatcccgcatctgacactggacaattacaaattactttttacaggcaaacatgattactggacatggtttggcaacagccttatcttaaccgtgatcactgtgatcctgacgttggcgatcagtgcatttgttgcatatggatttgcagcatatgattttaagggaaagaatttcttgtttattatagtgcttttgatcctctctgtaccgtttgaggttattatgctccctctgtacaagcagatttcaagctggggcatgatggacagctatgtatcagtagtacttccgtttttggcacatgcatccacgatcttcttcttccggcagtatctattgggactgccaaagtcgctgatcgaggcaggacgtatcgacggcgcaacagagtatggtatcttctttaaactgatcgtgccgatcatgaaaccggcattctcagcgatggcgatcttaaatggtatgaatgcatggaacaattatctgtggccgttattagtcatccgttctgcagacaaatacacactgaccattggtcttaatacactgatcaacccgtatggtgataactacagtctgttggttgtcggttctgtattttctatcataccgatctttgtattatttatctgcttccagaaatactttattgaaggtatgacagcaggtgcggtaaaagagtaagattttaagtgacaggaggaaatatacatgagtagaaaagcaaaaatggtactggataaagaatttcagatcgctccgatcgacaaaaggatttacggttcttttatcgaacatcttggaagagcagtatataaaggaatttatcagccgggacatccgtcggcagatgaggatggattccgcaaagatgtgatggagctggtaaaggagctggatgtgccgatcatccgttatccgggcggcaactttgtatcaaactttttctgggaggactctgtgggaccggttgaggagcgtccgcaccgtctggaacttgcatggagaagtttagagaaaaatgagatcggtttaaatgaattttccaaatgggcaaagaaagtcaattctgatgtcatgatggcagtgaaccttggaacgcgcggtattgcagatgcctgcaatctgctggagtactgcaatcatccgtcaggaacgaaatacagtgatcttcgtatcaaacatggtgtgaaagatccgcacaatatcaaggtgtggtgccttggaaacgagatggacggaccgtggcagatcggtcacaagacgatggaggagtacggaagacttgcggaggagactgcaaaggcaatgcgcctgatcgatccggacattgagctggtatcctgcggaagctccaacctggatatgcctacgttcccagactgggaggctgtcacattgagccatacttatgattatgtcgactatatctccatgcatcagtattatggcaaccgcgacaatgacagcaatgatttccttgcacagtccgatgatatggatacgtttatccgcacagtcattgcgacctgtgattatgtcaaagcgaaaaaacgcagcaaaaaagtcatgaatttaagttttgatgaatggaatgtatggtttcactcaaacgctgcggatgatgatattaccgagaaccatccatggcaggtggcacctccgatgttagaggatatctataactttgaggattccctgttagtcggactgatgctgatcacactgatgaaacatgcagaccgtgtcaagatggcatgtctggcacagcttgtcaatgtaatcgcaccgatcatgacagatgcggcaggcggagcatggaaacagacgatcttttatccgttcatgcatgcatccaaatacggcaggggcatcgcattgcagccggtaatctcaagctccagacatgcaacggcaaaacatgatgagatcacggacgtggaatctgtggctgtctataacgaagaaaaagacgaagtcacgatctttgcagtaaaccgtaacctggaagaggatgtagagcttaccaccgatgtgcgcagctttgcgggataccggatcaaagagcatatcgtgatggaaaacgatgacttaaaagcagccaacacgctgaccgaacagaatgtatatccggttaacgcagatgacagaagtaaacttgatgacggtgttgtcacaagcgtgttaaagaaagcatcctggaatgtgatccgtcttggaaaatagaatgtgagagcagttgtgtgaacaaattgttacagattcttcaaatagaattcaaaaaatgtacaacgggatttcacaaattgcggatatattattaatatcacgaacgagtgataaaactttttttcataaattctccccctttttaaatccaccatttccccaaaatggtggattttttgtgcaataattacaaatatcattaaaatagaggctttttaatgacagaatagcagcggtatgctaaaattcagacaagtattttcagatgtatgaaacgagggaaaatagttaaacaacttgtgatttattataaatacgaaggaaaaggagtgtccgtatgagtaatacaaccaaaagagcattagaggcatccttaaaaaaattacttttacagaaaccattagataaaattacgatccaggatctgaccacggactgtggaatcagccgtatggcattttattaccattttaaagatatctatgatctggttgaatgggcatgcgtggaggacggaaagcgggcgctgcagggaaaacgaacctacaattcctggcaggaagggttagagcagatttttaaggcagtgctggaaaataaaccgtttatcatgaatgtataccgttcggtcagcaaggaacagattgaaagttatctttataagctgacgtttgaactgatcgagggtgtggtaaatgagaaggcggaaggaaccggtctcccggaggaagataaacgttttattgcagatttttacaagtatggttttgtcggtgtgatgttagactggatcaaagacggtatgcaggaagactacagcacgatcgtcaaaaaaatgagtctgacactgcacggaaatatcagtaattcgattggaaattttttggatgaagtgtgatttatgtttcggatgacagtcagcaacgtcgtccggttaatttaggtacgctgtaccggatttgtaaatgcagggccgattatttatcaaaacaggcggaatgataaaaatattgtcattccgcctgttttgtatattggatttttatccgggaagtaataagatgaccacagaacgaagataataaaagcagttagaaaggagattcttattatgtcaaataaaaataaaaccatcgcgttagcatctttgattgcagcaggagccggtgtggcagcagttgcggcaagcaacagccacaaacaggcaaaggcaaagaaaatcgccgaaaaacagcaggcagagagtggaacaccataccgcaatacagagcgtggaaaatacgagaaaaacagcaaaggtatttattataccaacggtaactacgaggcatttgcacatccgaaaaaaccggaaggtgtcgatgagaaaagcgcatacatcgtaggaagtggtcttgcatctttagcagcagcatgttttctggttcgtgacggacagatgccgggcgatcatatccatattttagaggcaatggatatcgcaggcggtgcatgtgatggtatctttgatccatccagaggctatgtgatgcgcggcggccgtgagatggagaaccattttgaatgtctgtgggatctcttccgcagtatcccttccattgagacaccgggcgtttccgtactcgacgaatactactggctgaacaaagaagatccgaactactctttatgccgtgcaaccgaaaaccgcggcgaagatgcacatacggacggcagattcaacttaagccagaaaggctgcatggagatcatgaaacttttcatgaccaaagacgaggatctgtatgacaagacgatcgaggatgtctttgacgacgaagtatttgattctaccttctggctgtactggagaaccatgtttgcatttgaaaactggcacagcgcattggagatgaaactttatttccagagattcatccatcatatcgcaggcctgccggatttcagtgcactgaaatttaccaaatacaatcagtatgaatcactgatcctgccaatgcagagatatctggaggcagcaggggttgatttccagtttaatacagaagtcaccaatgtgatctttgatatcaaagatggcaaaaaagtggcaaccgcgatcgagtgcaaggtaaaaggtgttgagagcggtatcgtcctgacagagaatgaccttgtatttgtgacaaacggaagctgtaccgaaggcacaatttacggtgaccagaaccatgctccaaacggagatgcagaagtgcgcaacagcggctgctggaatttatggaaaaacattgcaaaacaggatccgtcctttggacgtccggagaagttctgctctgatgttgcaaagacaaactgggagtctgcaacggtaaccacactggacgataagatcattccatacatcacaaatatttgtaagagagatccaaagagcggaaaagttgtaaccggcggtatcgtaagctgcaaggattccagctggctgttaagctggacgatcaacagacagggacagttcaaggagcaggataaagataaggtctgtgtatgggtatatggactgtttaccgatgtaccgggtgattttataaagaaaccaatgaaagaatgtaccggtaaggagatcacggaagagtggctgtatcatcttggtgtaccgaccgaccagatcgaggagcttgcagaacacagtgcagtctgcgtaccgacgatgatgccgtacatcacagcattctttatgccaagaaccaaaggtgaccgcccggatgtcatcccggatggctgtgtaaactttgcattcttaggtcagtttgcagagacaccgagagataccgtatttaccacagagtactccgtcagaaccgcaatggaggctgtatacggactgcttggtgtagaccgtggcgtgcctgaggtatggggaagtgtttacgatatccgtgaacttttagacagcacagtcaaactcatggatggcaaatctccgttagaaatccagctgcctggtccgcttaacgcattgaagaaacctctgattcgccttgtaaagggaactgtggttgagaaagtgctgcgtgatcataatgtattgaaagatgggatgttagagtaataaataagagggtgaaaacacggaaattctgtgttttcaccctcttatacatatttttgggatgttcgcggagcattccacaatcatatgtatataaattgtattatttaagtttgttattaatgtcttgtaataatttaattatttcagagaaacctgggaacagagcctattttttcatttccagataaggcagaaatgaaaatccatttttcttatatacattgacggcccgttcattttcttcttccacctccagccgcaggatggcgtccgggtatttttccccgatatagtcgataaatttgcttccgatgccggcaccacggcaggattccttgatataaatgtcctcgatccacatgcatgacctgccaaattctgtggaaaagctttttgcgatcatgccatagccctggatctcgccggaaacctcaaaaatatagccttccagatatggattgtcattgatgcagttttcgatatcatttcggaaaatatcatcggatccgttagtaaaaaccgccggggatgcgtaaaatacacgcatcatttcaagaacactgtttttgtctttaggtgtcataggtcttatgatactgttcatttttatcctccatttaagaaaaattgatgtgttttctgacaagtatatatgaatgcgctgcccggcaaatattggtttgtgggtgacatgagtttccctgtgtagggtggttccggggggtttacgattggcaaattgcatcaagccgggaatgttttgtttccgttgtccgaaaataagacaatctaaggctgcctggttcagattgtggcagagtgacgtgtgtgtcttaaatgtgccatccgggcacattaagacttgtgctgccgtccatggcagcacaacactgtgttacggacaggcagactaagattgcctaattttctcccaaagtcacaaaacaggtctcggcttgatgcgatttgccagccgcaaggttgtgaaccacccttcgccggggaactcattttacaaccttgggggttcgtaaatttttgtgacgttcattttaaaaatgtcgaaaaacctcgacgcaatctgttatatctatgcttttaaccatacatacttggactaataatctgcattattagtctggtaatttacgaaatgattaatgtaatgcgacatagcagatgaaacttcagacaagtcatcaggctgaatatcaatgatacagtacattaggatcataagcagattataggcataatgtgaatatcaaaaatttgcacttacgcccccaattttgagatgaaccgcccacccaaatggtgttcacaacctggaggctggcatcttgcacaaagccgaagctaattttgtgactttgggagaaaattagaaaaacttggtctgcctgtagttacacagtgatgttctgccacggatggcagaacaaggcttcacgagccaaggatggctcgttgaacgccggtcacgtcactccgccataacctaaatcaggcagacctagcttttcttattttcgtacaacggaacccaaattaactccggctttgcgcaagatgtcgctcacagacctacaacacaccatttgggtgggcaatttatttcataaacaaaccatcatttattgggtgaaaaaacacacaaattattttaagaaatacaaccggttctgtcaaattgcattttattcagtactttaacgctttaaataaaaaaagtacttgccattctccgaaaaagaggctatcatgttactaaaataaggcagcaaaaggtattatataccaaaaagtatacaaaacaggaggattaaatcatggaaaagcgcatttcaggccacacaggacttttagcattgatcggttcaccggtcggtcattcaggatcaccggcgatgtacaattacagctttgagaagctgggattagactatgcttatgtggcttttgatataaaagaggacaaggtaaaagatgcgatcgctgcaatgaagactttcaacatgcgtggctgcaatgttaccatgccggataaggttgaggctgcaaaatacatggatgagctttcaccggcagcgcagatcatcggtgctgtcaatacaatcgtcaatgataacggaaaactgaccggtcacatcacagacggcgagggattcgtacataacttaagagatcatggcattgagatcaaaggcaaaaagatcacagtagccggaggcggtggtgctgcgacagccattcaggtacagtgtgccttagacggtgcgagagaaatctctattttcaatatcaaggatgcattctttgagagaaccttacagacggcagagaagatcaaaaaggcagtgccggagtgtgtggtcaatgtatatgacattgcagatactgcaaagatgacagaagagatccagtcaagtgatatctttgccaatgccacgatcgttggaatgaagccgatggatgaccagagtgttgtaaaagacctgtctgcattccgtccgggacttgtcgttgcagatgcagtatacaatccggaagagacaaaactccttcgcgaggcaaaagaagcaggatgtacctgcgtcggaggaaagggaatgctgttatggcagggagttgccgcattcaaactttacaccggacaggatatgccggttgaggatgtgaagaaattattcttcagctaggatatatcggtggatggtacgaagaaacgccttaaccaggaatgggaagtctggttgggcgaaaaatggatcatgcatattggttttgcccgttttcagggtataattagagaaaaatgaaacatattggatgaaaaaaatatgtttcatgtgtaaatagcccaggatttttggaaatcccgggctattctcttcattatgagtggtatacacccattttaattattttgaaggggaaaattcagcatttatgggtgaaacaaataggaaagaagaaagttacgcccattctgtaatcatatcatgtgaaaaatcaacatatgatcgtgatttacacttgcttcgaacggcagtcttatcatatcttacagataatcatgttttgcaagtacgtttaagatattacgtccctcttcagtaccctcaatgattcttcttgcacgtttgctgtcaccgatatttatgatttctacgttagtatctgcgaaagcttcctctaactggtctaatacagggttgtttgctctcattccgaggcagatgaaaccataatcaaatggaatttcttcgatctcaccctgaggattctttacgatgaaacgatcgttctgaacttcctgcagagcagtgttggtcatctgttttacgttgtattttgccattttggcatttgtatcacattttgtaaccggatcaagaccgtttccgatcattggaagcatctctaccatggttacgtcagaaccgcgctcggtaaagaattccatcacgtcaagacctacggcaccaccaccgatgattgcaactttctgaccatccattttttcaggatacttgttgatgcggtcgatcatctttaatacggtagcaacattgctgtcatctttgtcgacaagatcatgcagaccggtgatcggtggtaaagtaggaacagaaccggttgcatttacgatgatatccgggtttaagctctttactaattccggtgtagcgcttgtattcttgaagatgaataagttgcgaagcttgcttgcacggtgaatcatatagttcggaaagtcagctaaacgtttcttatccgggatcttggaaatcacggaagcaagtccgccaagctcagcttttttctcgattaagaaggtggtgcatccgacttctgctgcagtgcaggctgcctctaaacctgcagtaccgccaccgatgactacaacgttgcaaggtttgttgatcttatgtttcatgtaatcttcgccggagttgacagccgggtttacggtacaacggatcggctggtttaaaccgatacggtgtcctgcacatccgatgttacaggaaatacatttgcggatatcacattcttttccgaactcaactttgttgacccattccggatcagcgatcagtccacgtcccattccgataaagtcagcgtcgccttttgctaagatatcttcagcaactttcgggtcacggatattaccaacagtcatacatggtttgccgtatttttcttttacagcttttgccatgtaagaacgccagccgtccggtaaatagtttgcatcgatctggtactggatagaaccattcagaccacaggaaacgtcaaatacatcgacttctttctcgaagtactgtaaatactctaaagtatcctctaaggtatttccaccctctaccatttcgtcagcactgatacggacgaagatcgggaagaaaggtccaacctgtttacgaacttcctcgatgactaattttgcaaatcttgcacggttttctgcagaaccgccaaattcatctgttctcttgttggtggtaggagagaggaactggctgattaagtaggaatgtcctgcatggatctctacggcgtcaaatccacagatctgggcacgctttgcagcctcaccgtattttttaacgatgtgcataatctcatctttctctaatggacgagggatttctccgcctgccttggaaggaacatcagaagcggaaaccggctgcattccgatacgggaagacattgcggatgcacctgcatggtttaactggattgcgatacatgcaccgtgtttgtgtacgttttcgcataatttgaacagacgcggaatatagttgtctaagtcgatgcggagctgtgtcgtaccgttagaaccctgtggggaatcaacgcttgcgttctcgacaatcagaagacctgtgccgccctttgcacgctgctcataataattaatatgaagaaaactcatttcaccgttctgctcaccatagtttgttcccattggtgtcataacgattctgttttttacggtcatacgacggatggtcattggctcaaaaatatgaggatatttgtttttcatgataaaatctcctttgcatttaaatgaataaattgtgtgtggctgagattgttggataatgaaaactgcagcatagcttttggaatgtcagaaaacgtggcgcggtagtcgtgcagttttgggcgggcagataattatgttttagatagttacttttttaacaatgaaaaagtctgtgtgctctttctgtatttaatgtaccctgaaacagggaaaaaatctaattcgtttttttggacaaaatgatagaatttctctattgattctgattggtaagattgctatccttataatatgatgttgtgcgcagcaggcacatgcatattcggaagaaaccgggagatggattcatgaatttaagtcagttacagtattttagaactttggcgaaggaagaacattatacgagagcggcgcagatcttatcgatcacgcagccgtctttaagccatgcgatcgcgcagttagagcaggaactggggacaaggttatttgaaaaaaaaggcagaaatgtggttctgacacgatatggaaaaattttccttccatatgtggaggaatctttaaaagtattagaggagggcgtgcagcggacgaaagagttaaatggaagcaaagaaggtatgatacatctcgcttacatctatacccttggaagcacgtttgtgccgaagatggtgcggagattcttagatgcctatccggattatcatatcgactttcagtttattgttggaaagaccggagatatcatagaggggctcaaaaacgaccagtatgatatggtgttttcctcctatcaggatggggagccggacattgatttccggcagatcggcgatcagaagttggtgcttgctgtgccaaaagatcacccgcttgccatgtacgacagcgtggatttaaaagatacggtggattatccacagatctattttcagaagggaagcggactgcgcccggttgtcgatcagatgtatgaacagatcagtgtattcccaaagatcgcatttgaaatagaagaagatggcagtatggcaggactcgtcgctcagggatttggcattgcagtcatgccggatattccaatcttaaaaacacttgacgtcaaaaccctgaccatcacaaacccggagtacgagcgccatgtctacctcgccaccatgaaaaaacgctatctctccccggtcgcaaaatccttcatccagttcgttatgcaggagacagagtagcgagtctcacaacattcacagcctgaaaagagttttgcgcaggctgaccgccatcccatcaatgatacatcctccgcacaaactggataaacctttgtaccgccggcagctgatatttcccgcgcatatatcccatatacacagtatgtgaaaatgtttcctgcgagatcagcggacggatgcagatgtcatccctgtggatcgtatccacgtctgcgacaagggctatcccaaagtctttcgccacgagcgatgcaattccgttttcatccggcgattcgcagataaaattcgggagcacaccatgctccttaaaaaaattacgcgtatattttccgagaccggaatgccttgcatatccaagaaccgggtatttttgaaaatctccggcctcaatctcatcttttttacagagaggatgtccgataggaaggatcgctacaaggtcctgctttataataggaataaactcaatatttggttcatttgcagagtaagaaccaaagatcagatcataagaacctttctttaaaccttctatattcatggaagtgatatcctgaaaaaagtgaaatgtaatatttttattctgctctaaggaaagaaatgagcggacagtattcggaataaattcacgtgcaagcggggaaacataagcaatatcgatatgtccgccgttggttgcaatctgctgcattttattggaggcacgtgtcacatcgtctaaaatctgcgtgacatgctctaaaaaaatctcaccggcttttgtgagtgtcacattgcgcccgcgtttttcgaaaagtgtgacgccgagctcattttctaaagcggtgatggaacggcttaaacttggctcggaaatgtttattttttctgccgcctgattgaagtgctgaaggacggctgcctggtaaaaataacccaactgattgagtgtcatgtatagatctccttataaatgatagataatatctatggattataaaataaaaaccttgtttttgtacagattatatcataattaatacattaaagctactaaaaaagcatgaaattagcattggatgtattaaaaaaagcgttgtataataaatatatcagaggttgttaagtttttaacaaagcgggcaggtaatgttaaaaacatgaaactaataagaaaatcatgcaaaaagaaaaaaggagaacactactatggcagagagaatcacaggtcacacagagcttatcggattaatggcttacccaatcagacattccagttcaccggcaatgcacaatgaggcatttgcatatttaggacttgactatgcttaccttgcattcgaggttgacaacagcacattagaagatgcgatcaaaggtcttcgtgcattaaagatggttggatctaatgtatccatgccaaacaaaacagttgttggccagtaccttgataaattatcaccggctgcagagctttgcggagctgttaatacaattgtaaatgagaatggtgtattaacaggacatatcacagacggtatcggatttatgcagtccttaaaagacaacgacatcgacgtgatcggaaagaaaatgaccatcgcaggtgccggcggagctgcaacagcaatcgagatccaggctgcattagacggagtaaaagagatttctatcttcaatattcatgataaattctgggagaacgcagaggcaactgtgaaaaaaatcaacgagagaacaaactgcaaagcaactctttatgatttagacgacaaagagaaattaagagaagagatggcagattcctacatcttcgtaaacggaacaggtgttggtatgaaaccattagagggaatgtccgttgttcctgacaaatctttcttccgtccggaactgatcgttgtagacgttccttactctccgcttgagacaaagatgcgttctatggcaaaagaagttggatgtaagacaatgaacggtcttggcatgatgttattccagggtgcagcagcattcaaactctggactggaaaagatatgccgatcgagcacatgaaagaagtattaaacatcaaatacgaataaaatacccccccaatcacaaccccatgcggcggtatgaaaaaatgccgctgcatcacaaaccaaattgaggagaaaatcaatgaacaaaaaatatttaccgagcgcactgattctttatttaaattattttatccatggtgtcggatgttctattttaggacaggcagtgatcaaggaagcacttgcagcatcctggggtgtagaggctatggcaattacagccatttctgcggcacttggactgggcagactgatcgcacttccatttgcaggtcctctttctgataagttaggccgccgtatctctactgcaatcggaagcggttcttatgcgatatacttaatcggacttgcgcttgcatttaatgcaggaacaaatggcggatatcagattgcatatatctgcgcaatcgttggtggtattgccaactctttccttgataccggaatttacccggctgtaggtgagatcatttataaagcaccgggtgttgcaacgatgggaattaaatttttcattgcaatcgcacagatgatcctgccgttcgtacttggcgcaaccgtagcaacaacagcagcaggtcttacatcttataacacattattctttggatgtggtatcatttatattgtattattagtactggtaatgcttttccctcttccggatgcggatcagaaggcagcgggagaaaaagaaggactgatcgccagcttaaaacatacacatttttccatcgagtctgttgcgatgatcctgatcggattcacctgtaccggtacattccagctctggttaaactgcgcacagaactttgcaaaagaaaatgtgggctggacagatccttccattatgcagacttactattccgcaggaaccatgcttgctttgatcgtaactgcattactgacaagaaaaattaaagacgtcagatttattctgatttacccggtaatttgtctggctacactggtcgttgtattagtcggaaagagccagcctcttatgatcgcaggtgcattcttaatcggctgggcaggcgcaggcggattacttcagatcgctacatcagtctgcaacatgcttttcccgaaaatcaaaggaacggtaactgcactggttatgatcgcatcttctctgtgtaactacacgatcctgacagcagcatccaaaatgcagccttcacaggttatggttatgaatatcgtgctgacaacaatcggtgtggtactgggattatttgtaaaccttcgttacacaagtatggttgagcaggcacaggcagataatcaggagaagatctattaaagtaaaaacaggaggaaaaataatgagttcatatgtagaagttcgtggtgtgaaaatcggtgaaggcgtaccaaaaatctgcgtaccgatcgttggcaaaacaaaagaagagatccttgcagcagcaaagtcttttgcagatgtaaagatggacgttgttgagtggcgtgttgactggtttgacggcgtgttcgatttcgctcaggtagaggacgtgttaaaagatctgcgcccggcacttggtaatacaccgatcctgttcactttccgtacctcaaaagagggtggcgagaaagcaatcgagccggatgtttatgtagagttaaacaaaaaagcagcagcaaccggactggttgacttagttgacgtggaagctttcacaggtgattcttatgtgaaagagatcatcgaagctgcacatgaagcgggtgtggcagttgtcgcttctaaccatgattttgacaagacaccggacaaagatgatatcgttggacgtctccgcaaaatgcaggaattagatgctgatatcccgaagatcgctgtaatgccgcagaacaaaaaagatgtcttaacacttcttgcagcaacggaagagatggtatctgaatatgcagacagaccgatcatcactatgtctatggcaggaaccggtttgattagccgtctgtgtggtgaagtattcggttctgcactgacctttggcgcagttggaaaagcatctgcaccgggacagatgaacgcagcagatttaaatactgttttaaatctgatccatgagagtatgtaataagcgtatttttgaaaaggatgtcccgtatcgagacaattctcataagtaacaaaaaccggatgtcaaatgaagtgtcttttgacacccggttttttaattcacaggaaatcaaatttgaaaaaaaccagagaaatctgataggatataataataaatgagcgaatctgtatgtcaaaaaagttatacgagggaaggagaaaaggctgcatgaaaaagtttattcatgtcatagacgaaagtcttgaagaaatcctgatggttctcatgttagcggctatgacgttaattatggggtgtcaggtattttccagatatattcttggagtatcgctttcgtggtcggaggagatcaccagatatctgtttatatggtctgcatttttaagtgtaagtctctgtaccagaaaatgcatttcaatcaaagttgatcagttcatcaaaatgtttccgaaacgtggaaaaacgatttttaagattacgaatctcacggtagagtttgcattttttgtctatctgatccctttctcctttctatatttaaaagcaacgatagagagcggacaggtcagcccggcgtgtggtctgccaatgtattatgtgcagtcagccccgtttttctgttttattttaacagcgttccgcatcgtacagcgctggtttggtgagtggcgcattttacttggaaaagaaaagaaaccgttagaagagggcgatattgcctctgtgatcgaggaggcagtcgttgaaaatccggagcatgcggatgctgcaaatatggacaaatcaggtgttacagtgggaaaggagaaatagatgtcagcagttgttgtttttattatttttgccatatgtcttatcattgcaattccgatctctatttcacttggaattgtagctgtactgccgggagcatttgatgcttcttttacggcaagtgccggatatgtcatccgttccatggtcggaggaattgacagtttcccgttacttgcagtgccgatgtttgtgcttgcgggaatcctcatggcacacggcaagatttcagaaaaattatttgatgtatttgtatatttccttggaaacaaaagagcgggaataccatgtgcagtgatcattacctgtctgttttatggagcaatttcaggttctgcaccggcgaccgttgctgcggtcggaagtatgacgattccgcttttgatcgaacttggctatgaaaaagatttttccacggcgatcgttgcggtggcgggcggtcttggcgttatcatcccgccgagtatcccgtttatcatgtatgcgatggcgaccggtgaatcagtcagtgacctgtttttggcaggtatcgtaccgggcatgatgatcagtgcactgctgatcttttacgcatattattactgccgccgtcacggtgaggacagagagaagatccaggcgaaaatggatcagctcaaaacaaaaggattcgttaacattttaaaagagagtatctgggcgctcttaagccctgtgatcgtacttggctgtatttataccggtgtggcatccccgacggaggcggctgtcatctccgtattttattccctgtttgtcagtctgttcatttacagatctattaaagtaaaacagatctggggcattatggtggaggcgatgaagacctatgcgccgatcttatttatccttgcaacatctaccgcgttttcgcgtgtgctcacgctgatgcaggtaccgcaggatgtcagtgcatggatcatgacacatttctccaatgagatcgtactgcttattgtcatcaacgtggtacttctgattgttggtatggtcatggatacgaccccggcgattctgatcttaagtccgatcttactgccgatcgtggaacatgtcggaatgaatccgatccatttcggtgtcatgatgatcgtaaaccttgcggttggatttgtcacacctccggtcggcgtcaacctgtttgtggcaagttcacttaccaatgtgccgatgatgcagatcgcaaagaaggcaatgccgatgatcggatatttcatgcttgcactgcttctgatcacatttattccggcaatcagtctctgtctgctttcataaggagggcgaaaacttgaagaattgtaagaaaaagatattatgcggtttccttgcaggggcagtactttttgcaagtggctgcgggaataaagatatacaggatcaggcaaaagtgcagcgttatgcgtggccgcttggaagttcaagcccggaggatacggtcacacagatctatgcagaaaaatttgcagaggaagtggagcgtttgagcgacgggacgatgctgatttctgtttatccaaacagtgtacttggcggagacagagagttgttagagtcctgtaaagagggtgatatcccgtttgtggtacaaaatacggcaccgcaggtgacttttatgccggatgttgcagtatttgatatgccggcagtgtttgaaacgatcgacgaagtgagggaacatgtggataacccggatttcctttccatgatgcagcaggtatacggggatgccggatatgtccttttaggatatgccgaccagggattccgtgtgatgactacaaaccgtaatgtgcagtcaatctctgattttaagggacagaagatccgtaccatggaaaattcctatcacatggcatattggaaagcgcttggtgccagcccgacaccgatgacattttccgaggtgtatatcggactgcagcagggaaccatcgatgcgcaggaaaatccgtatgaggtcattgtttctaataaattatatgagcagcaggattatgtcgtggagacaaaccatctgccgcatctgatctcactgatcgtcagtgatgagttttttgaaggactgaccggcgagcagcaggaaatcatcagagaggctgcggagacagcgaaagaatatgcgagagagcagtcggatgagcgtatcgcatcccgtatccagacaatcgaggaaagcggtacacagattatttcattgaatgatgaaatgcatgaacagatcagagaactctgcaagccggtatatgagtcaattgaaaaaaatgtatcagaggatctggtcgatgcatatcttggcgatatgaaaggtgtgatcgagtagaaaacatgtcggaaatgatattatacactttaaaacataaatactttaaagtgctaaaatattttgcttgcggaatgtgtcacatcttgttataatgctttttataaaacagggaggaaaatcctctgctcaccagaggtcagattttacagagtaaaattgcatttttcttcggaaaacagggaggattataatggataagatagaagcgatccgtgagaaaattggagaatgtgatgatatcatcatcgaacagcttgcagttcgaatgtcatatatacaggaaattatttcttataagaaagcaaccggtattccaatcttacagccggaacaggagaagaaacagaccgatgcattaaagaacaaactcggtgacaatgagttcgaggaagagatccttgatattttcaaatatatcatgaaaaacagccgccgtatccaggcaaagagtctgtttgactacaacatcttcctgataggattcatgggagccggaaagagtacgatcgccggagaactgaaagataaacttgagatggaccgcgtggagatggaccagatgatcgtagaaaaacagggcatgtccatttctgagatttttgacgaatacggtgaggcatacttccgtaacttagagagcaacaccttaatcgagctgcagaaaagaaaacagacgatagtatcctgtggtggtggtgtcgtcatgagagaagaaaacaccgatcacatgaaaaagaatggacgtgtcgtattactcaccgcaaaaccggaaactatctacgagcgtgtcaaagacagcgacgagcgcccgatcttaaacaataacatgaacgttgaattcatcagcggtcttatggataaacgaaaagaccgttatgaagcagtcgcggacatcaccgttgccacagatggaaaaaacgtcacccagatctgcgaggagatcatctccaaactgatcgcattagataatgcgaaagaagcagaagcataggcatctgcagtaaatagaaaaaggtggtcacagactaacggctgtgaccgccttttgcccacgaatctacaaaaaactctagctaaatcgtaatcaaattatactgatcacttccaagtccaatcttaacagcatgcgcaatgcagctcttccattcaaaatggattttgatcgcagcgtatttgtcggtaaaatcgatcgtctcaaaccccgcagttttcataagacgatgcagtttctggagcagattctcatgctccgttgccttaaaagatgtgaaataaacatttgatgcttccatactgtgtgcctcctgtatgttttcatatactgtatacatgtcattatataagaaaaagatggaaatataagtagaaaaaatgtcagattatgctatactaaagcgtagagcaggaaacggagggaaatccgatgaaacggcagagtaaaccggagaaaattaaaaaagaaaagagcactgcaccgggagaatggttatattttgcacctgcaaatgtgacggtgcgcagcatttatgaggtgctgacagacgattatgaggtagagatctgggaagatgcaggagtactggaaataggattaaatgacggggcaacacttgatatcgaatggacaaagattccggcaaaagatgaaatcacggcagcatttgcaaagcaacatggctgtgaaaatgtatttctagtcactttaaaaccggaagaatttgagactgcaaagaaggcgatgaacaagatcgcagcttctttaggaggacttttctgcggagacactgaggattttacgccagtattacagtaggaaaagaggaaaagcatgacagaaaaattatacgaccaggatgcatatgcggtggagtttgatgcaaaggttatatcctgtgaagcataccaggagaagaaggagagcggttatcatgtgattttggaccgtacacttttcttcccggaagagggcggacagagtccggataaagggacgatagatggcatcgaagtgacggatgtgcagatcaaaaaagatgtgatcacacacagcttaaaagaaccgcttgctgttggggagaccgtacacgggatcattgactggacacaccgttttaataatatgcagcagcattccggagaacatattttttccgggattgtgcacagcagatttggatatgacaatgtcgggtttcatctgagcgacaatatcgtcacgatggattttaacggtgttttaactacggatgaggtgcgtgaagttgagacggcagtcaacgaagtgatcgtgaaaaatcttccggtcgagatcacctatccgtcaaaagaagaattgaaaacacttgattaccgcagcaagatcgaaatcgaaggacaggtgcgcattgtgacaatccctggtgtggatgtgtgtgcatgctgtgcaccacatgtgaagaaaaccggtgagatcggcatgctcaacgtacagagtctttctaattataaaggtggtgtcagaatcagtatcttgagtgggttccgtgcactggcggaggaacggaaaaaatcacaggtaatttcttctatttccggtacactttccgccaatcaggagttactgccagaacttgtggaaaaattaaaacagtccaaccaggatctgaaatataagctggcgcaggcaaagcaaaagctggtggagcagaagatgaaagagatcccggcggatcaggaaaatgtacttttatttgaaacggatctggatactccggtcatgcgtaacgccatcaatggacttgtggaaacgcatgcggggatctgcggcatttttgtggaaaaagaagagggcggttataattttattataggaagtaaaacaaaagactgcagagagatcgccacactgctgcgtgaaaaaacaggtgcaagaggtggcggaagtgctgcaatgatccaggggtctgtaagcgcagaggagaaggatttaagagaattgcttgcgtaaaagagagatatgtcagggaaaagggtttggaatatgatggaattaagtcagaagttagaacggctgatagagacagcagtggaaaaagaagagattgccggagcaaatattgtggtgatccgggatggacaggaaatggcatttgcagccggcggttatgcagacattgaagctggtaaaaaatacgaacgggatacgatcgcgaggctgtattccatgacaaaaccggtcacgtctgcggctgccatgcttttgatggaacgcgggctgcttgatccaggagctttcgtggaagaatttttgccgggatttcacaatgcgatcgtggcatcaggcggaaaacttgtgccgacggtccggccggtgaggatctgtgatctgcttaacatgacatccggtctgatgtacggcggggatgtcacaagtgtctgctccatggagacggaaaagctctttgacaggatcaaagaacacttatatctggaggatgcgatgacaacgcaggaggttgcaaaccgtcttggattgataccgcttcagttccagccgggagagagtttccagtatggaacctctgcagatgtgcttggggcggttattgaggtcatcagcggaaaaacttttggcgaatttctgaaagaagaattttttgaaccacttgacatggaagatactgcattttatgtaccagagaacaagcaggagcgccttgcaaaagtataccagaggacggaacagggattagaactttatacggaaaatcatcttggtatcatgaatgcgatggaacaggtaccggcgtttgaatctggcggtgcaggactggtctctacactggacgattacgcaaagtttgcagccatgttactgcaggaaggttcttatcagggaaaacagatcttaaaaccgcagacagtacattacatgacaaacggctcgctcatgtcatggcagcaggaagtgttagaccagtgctgggagggtatccgcggatatacctatgcaaaccttttgagaatccagaaagagccgggaaaatctccgatgtttacttccataggagaatacggctgggatggctggcttggggcatatttctgcaacagcccgaaagaccggcttacgatgcttcttaccatgcagcttaaggatgcgggaacaacatcgctgacgagacgcttaaagaatgtgatttggagtgaactttgcggaggaagacgggaatgaattttgactttatgatggaatgtgagataaaagatccgaaaatcaaggcggcatacgatgagatctacaaagaacttgtggatgcagaagcacattattggaaggagccgcagcagagcggcatcctgttccggaaaacagcagaacggatctgccgtttttacaatgattattacgagattggtttcccggaaggtacattgttagaggaatttttgtgttatacggataaagaagagcataatgttttagtgagtcgtttttttagcatggtcaaggatcagagagatcgtctgaataaattgagagtactcggtgatgactgtatctggggagaagagggaccggaccgcggaatggagttttgtgaccgtatggcgcaggatgcggagaagatggcagatgccatgatggaagtgatcaaggatatgtgccggcattttaacggaaggacggatgtggatgaccgtttattttacatcgactgggtgccggattattcggaggaagagagatttccgaaaaaagaagaggtaaaaaagcggagactttcgatcttttcaaggttttttggaggaaaaagcagtacataaaaacagagggaagaaagtggacattgaaagaagagggcagataatgtcagagggcagatgctgtcttcttttttgtgtatcttaaaaagtaccgtatgcaggctttaaaatcatatctttagcgtgtataatagaaagaagtgtaaaaagaaacaggaaaggcattggtcattcatatgcagcaaaagaaagaaaatgacaatatcatgaattatgatacggtgcgcctggatgatgaaaataatgcgatcattatcattgaccagacaaagctgccgggaagcatagaactgattgcattaaagacagcggaagagatctgggatgccatttacctgctcagggtaagaggtgctccggcaatcggagttgcagcggcatttggaatctatcttctggcaaaacagggcagtgcatcagattatgatacttttcatgaagagtttgtaaaacaaaaagagtatttagattctgcaagaccgacggcggtcaatttaagctgggcactgaaccgtatgcagggtgttttagaggcacatgccggtgaagatgtgtcaaagattaaagaatacctcaaagcggaggcagtcgagatctggcaggaggatatccgtgtctgcaaaaagatcggagagtacggtctgacgttagtgaaaccgggagacggcatcctgacacactgcaatgcaggtcagcttgccaccagcaaatatggcacagcgacagcaccgatctatcttggagaggaaaagggatatcactttaaagtatttgcagatgagacaaggccgctgttacagggagccaggctgacagcattcgagctgcagtcctcaggagtggatgtcacattgatctgtgataatatgtctgcaaccgtcatgaaaaacggctgggtcaatgcggtatttgtcggctgtgaccgtgtggcggcaaacggtgatacggcaaacaagatcggaacctccgtggttgctgcggtggcaaaatattataacgtcccggtttatatctgtgcgccgacctcaacgattgatctgaacaccaggacgggagctgatattcacattgaacagcgtccggcggaggaagtgaccgagatgtggtacaaagagcgcatggcaccggagggcgtcaaagtgttcaacccggcattcgatgtgacagatcatgaattgatcgcgggcatcgtcacagaatacggaattgcaagagcaccgtatacggagtcactgcaggagatatttaaaaagcgggaacaggaatcaggcagataagacagggcagaataaaaaatgtctgtaagaatgaataaagataaaaggagtgtatgagacatggcagagaatagtagttgcagcagcgcatcaagctgcagcagggagagctgtgagggctgtccgagcaaggcaaaaggtggaaacggaatcgcaaaagagccgatgaatccatcttcgaatgtaaagaaagtaattggcgttgtcagtggaaaaggcggtgtaggaaagtctttcgtgactgcatcacttgcatgcgccatgaaacaggctggttataaagtgggaatcatggacgcggatatcacaggaccgtccatcccgaaaatgctcggtgtacatggtcaggttgtcggtaccgaggagggaatgatcccgttagaagcagaaaacggtatcaaagtaatgtctgtcaatctgcttttggacaatgaggaagatccggttatctggagaggacctgtgatcgcaggtgtggtaaaacagttctggaatgagaccgtatggggagatgtggattatttatttgtcgatatgccgccaggaacaggtgacgtaccacttacggtattccagtcacttccggtcgacggtatcgtgatcgttacctctccgcaggaactggtacagatgatcgttaaaaaagcatacaatatggcagagatgatgcacgttccggtacttggactgatcgagaatttcagctatttaaaatgtccggactgcggaaaagagatcaaattattcggcgagagccatatcgaggatgtcgcagcggaattgacacttccggtattcggaaagattccgttagatcctgcatttgcagaaaaagcagacgaaggaaaattctatgagacagaaaatccttatctgcagaccgctgtcagagcactttccgcaatgagccgcattatgtaaaaaatttaccacttaccataggaaaacgaaccacttggtgtaaaagcatttacaccgggtggttcgttttttataatgtacctgtcagtacagaaaaggagacaggttatgaaaattaaaatcgaaatggatgaacaggcggaggaagaagtcattatccgctgccgtggaatgacagaacagattgcagccattcagagagcagtcagtgaggcagccggggcagtccagaagatcgtcctctacaaaggaaataccgagtattatcttccgatgaatgatattttgttctttgagacagcggatcatggagtggcggcacacaccggaaatgatatgtatgaggccggatacaagctgtatgaattagaggaaatacttccgggattttttatgagggtgtcaaaatcgacgatcttaaatacttctcatattttttccattaatcggaacctgacggcatcaagtgtcgtggcatttgagaatacgcacaaaaaggtgtatgtctcaagatattattacaaaccgttaatcagcaaattagaagaaagaaggttacatcaatgaaaaagaaaaatattgcatggggattattttttatatttcttgcggcagtgtatctggtgatcagcagtacagggatggaactgggtgttggtttgcccggtatttttatgacggtcctgtttgtctggctgtttgttgaggggataaaagatgttaatttttattcgattgtatttgcaatagcctttatctgcattctttacagaaaacctcttgggctggaaaaattaggactgacaagctggacgatacttggtgcggcattgcttttaagtatcggtctgtctatgatctttaaagatgtacgaagaaaaaactggaaaacaaaaaccataaactgggatgaacaaatgagtacgccaaacggtgagcagtgcagcggtgaacacatccgctgcgaaaataattttggctctgccatccgttatatcaattcggagcatttctgcgatgcacagcttgaaaataactttggaagtatgagcgtttattttgacaatgccataatcgcaggggaagcggcgtcggtcgaagtggaaaataactttggggagacaaatctctatataccaaaagaatggaaagtgcagaatgaactgaagcgttcctttggagcagtggaggaaataggacgcggcgaaggcagcagcgttgcaacactgtatctgcgaggggcagcaaattttggagtaatcaaaatttattatatctgaccggtaagaccagatgctggtgcagtatgtgaatactttctatgaatgaaaaagttctccggatgacatgcaggttattcctcatcatctgcataactggtatcttcgtgcagattcgggatcatatcaagaccacggtttgcatcgatcttcggatcttttccgaaatggtaatcatttcccggcaggatcgcatttaaaaagatacctgcgattgcagcgatggcaagggaagtaagtgtgatggaagttccggcaacggtaaaagtaagaccatctgaaaaaccaagaccacacacgaaaatcacaccggcaatgataaggtttctggattttgtaaaatcaacatggttctctacaacattccggacaccgatcgcagagatcataccgtagagcataaagctgacaccaccgatgatcgcagatggcatagaaccgatcacttcagccatttttggaatgaagcttaagagaatcgcataacatgctgctaaccggatcactttcggatcgtgaacacggcttaattccagaacaccggtattttcaccgtaggttgtgttagcaggaccaccgaagagtgcggagagtgcagttgcaagtccgtctccgattaatgtgcggtgcagtcccggatcctcgataaagttctgatttacagtcgcagagatcgcggagatatctccaatgtgttccatcatggttgcaagtgcgatcggagccatgacaaggatggcagagatattgaatttgcagatggaaaatgcaggaacaccaatccaggaagctgctgcgatatttgaaaaatcaaggattgcagaaccgtccgcatttgtcataccaagtgcattaaagatgagagcggcacagtaggaaatgataacacccatcaggatagggataattttgaacatgccctttccccagatattaaagatgatgatgactgcaagggcgatcagtgctaaaagccagttcttagaagcgttgtttaccgcagaacctgcaagacttaaaccgatacagatgatgatcggaccggtaacgaccggcggcaggaaacgcataacctttttgacaccgacaagcttgatgatcagtgctaagatcaggtataaaagtccggcaacaacaacaccgccgcaggcataggacagtttgtctgcattcgacatctcagcaaatacaccggaatccatggaagcgatcgtggcatatccgcctaaaaatgcgaacgaagaaccgagaaaagccggaactttaaatttggtgcaaaaatggaaaaacagtgtgccgataccggcgcagatcagggtgacctgaacatgcaggacatcctccccaaaataactgtttaccaggatcgggacaagaattgttgcgccgaacatggcaaacatgtgctgcagaccgagcagcagcatctttggaatgccaagaactgaggcatcacggattggttcattgttttgattcatagaatcctcctttgtttttcggagaaaaatgcgagcccattggcgagcagaggattttcctcctttgcttgtttacttttttatcccataagaaacgcaccttcgatggaaagtgcgttgtggaatcaaaattgggttgtagcagttttttcatagctgcgtaccgggatccggttcaattcgtcggtgcagtcgagataaaaaataacgagtgtttctgtctgatatggaacgacccagagggatgcgatgccaaaggaacagagaaccaataagccatatccgataaaactgagcagaatataaagcagacgcagacggttgccgtgcatgagaagtctgcattctttaaaaacttccagacatttaagctcaggatgatcgagtgtgatatatccgataaaatgataggtaagcataaaataacagcttaagatcagagaaaggattcccgtcgctgctgcaattacaatagaaaccactgaaaaatctgcgatcactgcataagtaaaaccaccgatcacaggaatcatggaaacaaagatcatcagtaaaaataaaaatcccgcgataaaaaatcggtctgtatttttcttaaatggatcaaaaatatcgcggacgcgaaaatcatttccgcgtgtcatggacagatggatctttgccacgccgcatcctaacacaaaagagacaacagatatgagaagctctgcgatcagtgagatcacaagctgcatatttgtcggattatctcccatggaaaacgaaaatggagattcgatcaaagttgcgatcagtgttgtggcagcaaaagctgccatcggaacacggtatctgtcatttaaaatatcacgcgcaatgcgtttgagttcttttgatgtgcgtttcattcggtaaataactccttttagatcatacagcagcggttacagcgttgctgcaattagaataaattatagcataggtggcggggggttgtatagatgtgtatttctgataaaatgtgggggagggtgttgatggcaaatggtgtgtgttagtgttttggtgggcaaattgcacaaaccagtctcagctttgtgcgatttgccagccgctactttgtgaaacatcatttgcgtcaacacttaaaagatatacttcaatgggaaaagaacaggatcaagatatcaaatggaaaaaagaaataataatgaacagaaaaaaatagataatgttttatatatacttggtctgagcggcacagtcatctgctgcgtgtatctgctcatttcaaaaataaccggatttcgtatcgaaaactatctctacccgtgccttttccacaccgtaaccggatactactgtccgggctgtggaggaaccagagcggtatgtgctctctttcagggacattttctgatatcctttttggaacatccgtttgtaccgtatgcagcagtactctgcgcgtggtttttattaagccagacgatcgaacgtctctcacaccataagctgccgcttgcaatgcactataaagaccgttacctctggatcggacttgcaatccttatcatcaattgtatggtaaaaaatatcgtccgcctcttctggggtataagccttttataatagaagatgctgatagaaaaaatagcggcgcaaaatctgccacccacgaaccttcaaaccaccttttgtcccctgaatctcccacaaaaaactcagttctgcggaaacagcatattataatcaatccccagcgatgtacaactttcccgcatcatattttcaattccaccatagtaaacgttagcgaataccaccgaataaattaagagcagcacaataatgccaagcgctatgctgcttaaagtaagcccaagctttgcacgcccggaaaatgttgtctcaccgccgcgtgagagcagtgcaaacacgatgccgagcgcaccgcagattaatgccggataaaccagacagaacgttgaaagtgcaatgatccccatgataagggaaagattttccatatgttttgaatgccggtcaggcattggtctgtaaaactgatgatccataaataagcctttctgaaaataaataatatgatgtggatagtgtatcatgcggtgtgaaaaaaaacaatgttaccttgaatcactgtggacatttcgttataataaagatattgcgccggagaaaacgttaaaatccggtgagaaaaaaggagtaactatggatattattgcaaagatttccgaggaactcggaatccgtaaaaatcaggctgaagcagccgtaaagctgatcgatgaagggaatacaatcccgtttattgcccgttaccgcaaggaggcaaccggagcacttaacgatgaggtgcttcgtaatttatatgagagactgacttatttaagaaatctcgaggagcgcaaggagacggttcttgcaggcattgaagaacagggaaaactgacagacgaattaaaagcgcagatcatgtctgccgaaacaatggttgtggtggaggatctctaccggccgtacaaaccaaagcgccgcaccagggcgacgatcgcaaaagaaaaaggattagagccgcttgccggcatcatcacgttacagatgttaaacacatccttagaggaggaagcagaaaaatttgttgatccggaaaaagaagtgacgagcgcagaggatgcgatcgccggggcaaaagatatcatcgcggagagcatttcggatgaggcggattaccgcagccggatccgtgatctgacggtcaaaaaaggacgcatgatttctgcggcaaaagacccggaagcagagtctgtctatgagatgtactatgaatttgacgagccggtggcgaaacttgccggacaccgtattttagcgttgaaccgtggagaaaatgaaaaattcctgacggtaaagatcgaggcaccggtcgaggatattttgcgttaccttgaaaaaaaggtgatcgtgcgcgacaacccacagacgacgccggtattaaaagaagtgatagaagatgcctatgaccgtctgatcgcacctgccattgagcgtgagatccgcagtgacctgaccgaaaaagccgaggatggtgcgataaaagtattcgggaagaacttagagcagcttttgatgcagcctccaattgcaggacaggttgtacttggctgggaccctgcattccgtaccggctgtaaacttgccgtggtggatccgaccggaaaagtgctcgatacgacagtcatttacccgactgcaccacagaataaagtggaagaggcaaaagcggttttaaagaagctgatctcaaaatatcacatcacactgatctcactgggaaatggtacagcatcccgcgagtccgagcaggtgatcgtagagttattaaaagagatcccggtcaaagtacagtatatcattgtcaacgaggcaggagcttccgtatattctgcaagtaaacttgcaacggaggagtttccacagtttgacgtaggacagcgaagcgcggcatctatggcacgccgcctgcaggatccgcttgcagagcttgtaaagatcgatccgaaatcgatcggtgtcggtcagtatcagcacgatatgaaccagaaaaaattaagcgaggcactcggcggagtcgtggaggactgtgtaaacagagtcggcgttgatttaaatacggcatctgcatccctgcttgaatacatttccggtatcagcaaggcagttgcaaaaaatattgtggcataccgtgaggaaaatggccggtttgaggcgagaaaccagctcttaaaagtagcaaaattaggaccgaaagcatatgagcagtgtgcaggttttctgcgcatcaacgatggtaaaaatccgctggatgcgaccggtgtacatccggagagttatgcagcggcaaagacactgttagagcgtctcggctatacgacggaggatgtgaaagagcgcagattagacggcatttccaaaaaaatttccaactataaaaagctggcagaagaacttggcgtgggagagattacactgcaggatatcgtaaaagaacttgaaaaaccggcgcgtgatccgagagaggatatgccaaagccgattttgcgcagcgacgtccttgaaatgaaggatttaaaaccgggcatgatcttaaagggaacggtccggaatgtgatcgactttggagcatttgtggatatcggagtccatcaggacggactggtacacatttcacagatgagtgaccgttttatcaaacatccgctggaagtggtcagtgtcggcgatatcgttgaggtaaaggtattggatgttgacctgaaaaaacagcgcatcgcactcacgatgaaaattaatggttgacagatcagaaaaacatgcatacaatagagagcgtaaaaatagtattaattcttcggggcagggtgatgcagtaagatttgcagattcccgaccgacggtgatgtagagtcctgataatgatcagagtcatttacaaagtccgtgacctgctaaggcagctgatccggtgagattccggaaccgacagtatagtctggatgagagaagataagcatgtgaatgataagacgtcagaaaagacgtttctgttacatgatagaaccccggatgatggttacatccggggttttgtcgtattcagacagcagaatgctcacaaaatgtgcattttattgtatgagatatttcggcagacaaaaacacgcttacaatccctcgcattttccgaaaagagaaaaggagacgagtgaaatggatgcaacaaacaaaacagtaaccgtaaaaagagtcaatgtaagatatctgacagtgacagctatgctttccgcagtggcatatatcctgatgtttctggatttttccgtgccgtttatgccgtcatttatcaagatggatctctcagaacttccggcactgatcggatcatttgccatggggccgctctgtggtgtgatcatctgcctggtaaaaaatgtacttcatctgttcattacatccacaggaggagttggagagctttcgaattttattctgggtgtggcatttgtactgccggcagggcttctttataagtacaaaaagacaagaacgaccgcactgatcggttccattgcaggagcagtgatcatgggtgctttcagcattgtttcaaactactttctggtatatccggtctattacaatttcatgccacaggaggcagtgcttggagcatatcagctgattgctccgtccatgaagagtattttacagtgtttaatctgctttaatatgccatttacctttatcaaaggaatgttttccgtagtcatcacatttgtgacctacaaacacatttctccgatcttaaagggaagacagtcataagcaggagctaacagaggattcgttactgtttacagtcaggcattttctgaactgaaaatgccgtatgatacagtggtggtagcagattttgccgatttggaatgcgaagcatcggcaaaatccgttactggaacgaggtacgagtggacagtaacgagttttcagagagaaaagacgcagaaaaagaatgcgtcttttcttttttttcaaaaaatgttatactaagctgattctaaaatggtgggggattgacgatgagattggaatttgatataacattgaccgcaaaggacatgtttcgttttaacctgtaccagacatacactggtgcatccgggtggatttccgtgatagcggcagtcgtctgttttgctgcggcaggtacaaaatacagtgaacgcggagcatcctatacggttcttggtattttgcttggagcgctgatactgttttacatgccggtgacactttatcttcgttcgaaacagcgcattgcggcgtcagaggtattgaaaaacagcctgcattactgtgtggacggagaagggatttccgtgacacagggggatgcagatgcaaaactgatgtgggatcaggtctataagatggtgtccacgaaaaataatgtgctggtgtacagcaaccgtgtgaatgcctatgtgatcccaagacagcagttaggggaagaatactgtgaacttgcagaaattgcaaaagaaaaactgccgaagtaccgtgtgaaattaaaataaatttgtgcatggcagatattttacctcataaaaacatggaggactgaattatgaaagaaaccgtttatgagacattttccgcggcagagacacatgcacttggaaaaaagatcggggaaacggcgaagccgggagatgtgtacacacttgtgggagaccttggcgttggcaagactgtttttacacagggaatcgcagacggacttggcatcacagaacctgtgtcgagcccgacttttacgattgtacaggtgtatgaagaaggaagaatgccgttttatcattttgatgtatacaggatcggcgacatcgaggagatggacgagatcggttatgaggattacttttacggggaaggtctgtgcatgatcgagtgggcaaacctgatcgaagagatccttccggataaacgctatgatgtgacgattgaaaaggaccttgaaaaaggatttgattaccggaaaattaccataaaagagcatgagggctgataaaacagttcgttcatgcgggaatggagcttacaatgaaaattttgggattagacagttcaggactggtggcaagcgtggcaatcgtatgtgacgataacatgcttggcgaatataccgtcaattataaaaaaacacattcacagacgcttctgccaatgttggatgaagtggcaaagatgatagagctggatctaaattcgatcgatgcgatcgcaatcgcaggaggtccgggatcatttaccggacttcggattggttcggcaacggcaaaaggacttggactggcattaaataagccgatcatcaacgtgccgaccgtagatgcgcttgcgtataatcttgtcggacatgcaggacttgtgtgtccgcttatggatgccagaagaaaccagacttacacgggactttattcttttgacggcaatgagatggaagtattaaaggaacagtgcgcagtcggaattgatgagattatttcgattgtaaaccagttcgaacagccggttacttttttaggggatggtgtgccggtatttcaggagtatatagcagaaaactgcagtgtaccgtatacatttgcccctgcacacgtcaataaacagagagcaggagcggttgcggcacttggcatgaaatattttgcagagggcagatcagaaaccgctgcggaacacaagccggaatatctgcgcctgtcccaggcagagagagaacgaaaagagggcggattagcatgatcacagtcagagccatgcaggtaaaagatgcagaacaggtaagtgaactggaaagaatgatcttttcacagccatggagctatcagggatttgtggattcactcagtctgcctaacacggtttttctggttgcggaagaaaataataagatcttaggatatatcggaatgtatttatccattgatgaaggtgagatcacaaacgtggcggtttcaccggaaatgcggtgccatggcattggcggcatgctgcttgcggaagcaaaaaaagaggcagagagccgctcggtcggcagaatcgtgctcgaagtccgttgttcgaatgacagtgcaatccgtctgtatgagcgcaatggatttgtaaatcacggcgtgcggaagggattctatgaacttccgaaagaggatgcctatattatgatatatggccaataattcccactacataaggcagaatcttgtttgtataatatagatattaatagatatctgtggacagcataggttttcgtggacaatgtctgtctgtattgcagaatgggaaggcagaaaaaatgagcagaaaagatcagaaaatatattgtaactgttgtggaaaaatgatttgtctgttatctgagaagaaccgcacttcattccttacggtggagaaggagtgggggtatttttccgataaaaaagacgggaggatacacagaatggatatctgtgagtcctgctatgaaaaaatggtagaaaaatttgtgataccgccggaggaaaaacaggtaacagagtttgtatgaaaggagtaaaatctatgcccggtatgctgggcattgctcaccagagggcaaattttacaaaacaaaattgcattttgctccgcaaaacaaggagtaaaatcctctcctcgccagtggactcggattttgctccgcaaaacaaggaggattatatgttagacgtatgtcttttgggaactgcaggcatgatgccgctgccgcaccgttggctgacggcgtcactgatgcgttataacgggagcagtttacttattgactgtggagagggaacccagatcgcaatcaaggaaaaaggatggacttttaagccaatcgatgtgatctgttttacacattatcatgcggatcatatcagcggactgccgggattgcttctttccatgggtaatgcagagcggacggaacctctgactatgattggaccaaagggattagagcgtgtagtcggggcacttcggatgattgcaccggaactgccgtttgaaataagatatattgaaataatggaaccggaagccgatatagaaataaacggatatcatatccatgcgttccgcgtcaaccataatattacctgctatgggtataccgtggagatcagacgtgccggaaggttttccgtggagcacgcgaaggaacgtgaaattccacaaaaatactggaacagacttcaaaaaggggaagagatcgaaacggaagatggggcacattataccccggatatggtgcttggtgctgcccggaaagggatcaaagtaacttactgtaccgataccaggccgacggaatcacttgttgcttctgcaaaaaattcggatcttctgatctgcgagggtatgtatgcggaaaaagaaaaaattgcaaaagcaaaacagtacaagcatatgactttttatgaagcagcggaagtggcaaaaaaagcggaagtcgcagaaatgtggctgacccatttttcaccgtcactggtgcatgcagaagattatatgccgcaggtaagggagattttccccaatgcttttcttggaaaagatggaaagagtgtggaactgatgtttgaggatgagaaaaattgagaggggattcatatgaaaaagaatggacagaaaatcatttttgcagttgtatgtgttgtgatcattgtgggacttttctggtatactgcggcgaaaaagggaaattcggcaggaaataacgatgaccttacggaagtagagaaagtgattaccaagaatcttgaaaagaattacccggaaacaccaagagaagttgtgaaattttataatcgtattattacctgcttttatgatgaagagtatacagatgacgaactttatgagcttggcgatcaggcaagacttctgatggatgatgaactgttggaaaacaattccagagatgattattttaaaagcctgaaagccgatatagaagactatcacgacaagtcgaaaaagatagagtcctcctctgtgtgcagcagtgatgaggtaaaatatcaaaagattgatggggatgactgcgcttatgtgacggcatcttattttgtgaacgaaaataaaagttatacccgtacaaatcagacttatgtgcttagaaaagacaaagacggaaaatggaagattttagtattttatcagaccgaaggagatacggaagatgagtgacaaggagataaagattcttgcaatagaaagttcatgtgatgaaactgcggcagcagttgtggtaaacggcagggatgtcagatccaatgtgatttcatcacagattgcacttcacacattatatggcggtgtcgttccggagatcgcttcgcgaaaacatattgaaaaaatcaatcaggtgatcgagcaggcactcagtgacgcagatacgactctggatgatatcgatgcaatcggtgttacatacggaccgggactggtaggtgcactgttagtcggagtagcggaggcaaaggcgatcagttatgcgaaaaatatacctctggtcggagtgcatcatatcgaaggacatatcagcgcaaactacattgagaataaagatttagagccgccatttttatgccttgttgtatccggcggacatacccaccttgtaaaagtgctggactatggaaaatacgagatattaggacgtacgagggacgatgcggccggagaagcttttgacaaagtggcaagagcaatcggactgggctatccgggtggaccgaagatcgaaaaagtatcgcatgagggaaatccccatgcgatggagttcccgcgcgcaaaaatcgcagatggaccatatgatttcagcttcagtgggttaaaatccgcagttttaaactatctgaacggctgccagatgaaaggaatctctatcgtacaggcagatgttgcggcatcatttcagaaagcagtgacggatgttttgatcgggaatgcgatgaaagcaatcgatgagtttaagatggataaatttgcgattgcaggaggcgtggcttccaacggagtcctgcgtgaaggaatgcgtgaggcgtgcgagaaaaaaggagtgcagttttatcatccatcaccgattttttgtaccgacaatgcggcaatgattggtgttgctgcttattatgattttatacatggacagagagatgggttagatctcaatgctgttccaaatttaaaacttggagaacgctaatggaaaaatttacggcgatcgttcttgctggtggaaccggaaaaagaatgcacagtcatattcacaagcaatatcttacactggcaggaaagccggttctttattatgcattaaaggcatttgaggagagtgatatcacagatatcatccttgtcacaggtgccgatgaggaagcgtattgtaaacggaaaattattgataaatatcatatcggtaaagtaaaagcaatcgtgccgggtggcgtggaacgatatcattctgtatatgcgggactctgcgcagcggagggggcggactatgtgctgatccatgacggggcgagaccgttagtgtcggccgatatcataaaaagatccatgcaggcggtgaaggaatatcgtgcatgcgtggcgggaatgccggtaaaagacacgatcaaaatagcagatgaagacggttatgctaaattgacgccagagcgttcaaaagtatggcagattcagacaccacagagcttttcctatccacttgtatatgaggcatatcgaaaaatgcttgcagatgaggactctgccattacggatgatgcgatggtggtggaacggatgacaaaccagccggttaagctgatcaaggggaactacaggaatataaaaatcaccacaccggaggatatgctgatcgccgaaatgtacttaaaacagggcgcttcaaacatctgaaatgaaaaaaatgaaaaaaagttaaaataattgttgacagaaacaaaagttgatggtagaatcttttttgcactgattcgtgcaaaacaaatacggagaggtatcgaagtggtcataacgaggcggtcttgaaaaccgtttgtccgaaagggcgcatgggttcgaatcccatcctctccgcttactgatgaaagtcagtacgaattaatatgtaatgcaattcggagaagtacccaagctggccgaagggacacccctggaaagggtgcaggtcgttaatagcggcgcgagggttcaaatccctccttctccgctcgcttgaatgattaattcaaaaagttcttgacaaagacttaagaatgagttaatatagacaagctgttcgaaagaaaaaactttcgacaaaataaaataaaaaagttcttgacaaaacagacttgataagataaaatgaacaagctgtcgccgagaacgacaacaaaacaaagaaccttgataactgaacagtgaaataaccttgaaagattcaatgaatttcagggtgttgtg

SEQ ID NO: 5151 - DNA, 32056 bp, Unknown
  gut microbiota DNA sequence
ttcatataattctccatcagcgtatatattttttatatgtaatgtcacattttgaggagaagtctgataaagttgggaaatacttttttgtgtcatccatatagtggaatcgttgaaataagcatcaacttttgtatcccccttttcattttgataaattagaatatttccttgaaaattcaaatcagtatctcctttcaaatagttaaatgttcaatttttttcgtaaaactcttcaaaaataattctagcacatatcggtgtgctccgcttatttttttctagcatttatggaattgatctgaatattaatcattttgtgggttaatatttggctcttgattttcatctgaaatattgcaaaatatccgtgaaaagggtaatattttaaatagagcgaaagacacacaacaggcgcagacaattgtcggcggccggaatatgtgaaaactgggcaaagtaaatatgggtatgcaggaggaaacgcggatgaagagaatcggtatgttaacaagcggcggtgattgccaggcattaaacgcagcaatgcgcggcgtagtaaaaggcttaagtgaaaatgtggatgagctggagatttacggctttttaaatggttataaagggctgatttatggagattacagattactgacatctgcagatttttccggaatacttaccaaaggcggaacgatccttggatcttccagacagccgtttaagcagatgcgtgtgccggatgcgaacggattagacaaagtggaggcgatgaaatctacctattataagttaagactggactgtctggtcatcttaggcggaaatggaacggagaagacggcaaatctgctttgcgaggaaggattaaatgtaattcatcttccgaaaacgatcgataacgatatctatggaacggatgttacattcggatttcagagtgcgatcaatatcgcaacggatgcgatcgactgtattcatacaacggcagcttcccataaccgcgtatttatcgtggaagttatgggacataaagttggctggctgacactttatgcaggagttgcaggcggtgcagatatcattttactgccggagattccttatgacattgaaaaagtgatcgcagctattaataagcgtaccaaagccggaaaaggatttacaattcttgcggttgcggagggagctatctcaaaagaggatgcggcattatccaaaaaagagtacaaagaaaaggttgcaaaacgcaaatatccgtctgtttcctatgagatcgcagaccgtatttttgaggagaccggagtggaagtccgtgtgacggttccgggacatacacagagaggcggaagtccgtgtccatacgaccgtgtactctgtaccagacttggttctgccgcagcacaggctgtcatggacgaggattatggcaacatgatcgccatgatcaatggaaagacaaaacgcgttccattaggtgaagtggcaggcagattaaaaacagtagacccggattgccagatgatcaaagaggcaaaacggattggaatcagtttcggggattaagatgtcatacacagcattatatcgtaagttccgtccacaggagtttgaggacgtcaaaggacaggaacacattgttacaacattaaaaaaccagatcaaagcagacaggatcgggcatgcgtatctgttttgtggaaccaggggaaccggtaagacgaccatcgcaaagatatttgcaaaggcggtcaactgtgagcatcctgtagacggcagcccgtgtggagagtgcccggtctgcaaggcgattgcagcgggcaactccatgaatgtgatcgagatcgatgccgcatcgaataacggtgtggataacatccgccagatccgtgaggaggtggaataccgtccgacggaaggcaaatacaaagtctacattatcgatgaggttcatatgctttccataggtgcatttaatgcactgctaaagacactcgaggagccgccatcatatgttatttttattctggcaacaacggaggcacacaagataccgatcacaatcttatcccgctgtcagagatacgatttcaggcgtatttccattgagacgatttctgcaagactgatggaactgatggaaaaggagcaggtcacagtggaggaacgtgcgatccgctatatcgcaaaggcggcggacggttccatgcgggatgcactcagtctgttagaccagtgtattgcgttttatcttgggcaggatcttacttacgacaaagtacttgaaacactcggtgcggttgatactgagattttcagcagactgctccgtcagattttagagaaaaatgtgaccggtgcaatcggtgtgatcgatgagatggtcattgagggcagggaattaggacagtttgtcaatgattttacctggtatctgaggaatctcatgcttgtacagagctcggatgacatggaggatgtgcttgacatttcaacggagaatcttgctctgttaaaagaagaggcgcagatggtagatacagacattcttatgcgctatatccgtattttttcagaactgagtaatcagatccgttatgccgtacagaagcgtatactgatcgagattgcggtgatcaaattatgtaaaccggagatggaaaaagattatggttcgctgatcgaccgcgtggacagtcttgaaaaaaagctggagaagggtattgtggtaacgcaggcatccggtgacatggctgcggggacaacaggttcttctgccgcatcggcggtgttaaaaaaaaaggaacttcccaaggcaatccctgaagatatcaaacagatcatgagcagctggagcggcattttatcacagctgacaggaatcacaagaacctatctcaaaaaagcagttccgacattaggagagggcggtacgctgatcctggcatttgaggatgccaatgcgtacacttatatagaagagaaccgttctaactgccaggatgaatttcgggcagcagttgcagaaagacttggcaaagaggtagagattctggtaaaattaaatgacactggcacgccaagcggggagatctatcccgatttacgccagttgattaattttgaaatagaagaagacgatttttaggaggattcacatggcaaaaagaggcggtttcccgggcggtatgccgggcaacatgaacaaccttatgaaacaggcgcagaaaatgcagcgtcagatggaagaggcacagaaagaattagaagaaaaagagattactgcagcagcaggtggtggagctgttgaagttactgtttccggtaagagagagattacaaaagtaaaattatccgaggaagtagttgacccggatgacatcgagatgttagaggatctgatcatggcagcaaccaatgaggcacttcgtcagttagaagaattctcttcggattccatgtcaaaaattaccggcggcatgggtggtcttggcggacttccattctaaggggaaagagcacgccatatgttttatgggcgaatttatttataagacccgggtgtcagccactttttgatacccggatttccgcaggaaaaaaggcataatgatttagggaagacaaggaatgtttttcgcctgaatcattatgcttttttgattcattggaaattacgttccatgaactcaaaagacctcagtttacaactttgcccggaacacttcatctgccggatagccgccggcacatttctgcatgccgcgctgaatactgtctgcggaatttccccagtctttatctttgttccggtagtcatttttttctacaaaccatgcgacttctttttgcaggcgttccatattttcctgcatcagtgcaaatgccttcgggtaaaactcctttttctgcgtatcgtttaatttgttttccgcagtctcgatcagatctccgaaatgaggcaggcaaaagcctttgctctcttcaaaaagctggcggaattcttcatttttcagatacaggtcgaaaaaggtatccagatatctgccgtagattttacggaaatgatcgcagacatagcagtctgtcgtctttttggagatccatgcgccaagtgcagtctgcggttcatgttctgcggttgcgtctgtgcgtttcatgcgttttaacagacttgatttgcctggggcaaaatcggacatttcttttgcgagttcctgattcaatttcttcaaatgcgtgcttaagatcaatgcatttccaagtcggttgccgtaatcgtacatcattttaaagtgatggcggcagaatccggttgcatctgtcttttcacggatatcatcctccatataggcggaacctaaaataaatgagaccgcatgctgctcggcttcgcgctctaaattgcagaaagggcattcgtctttggcgttgaatgctttgattaaagggatggttgcaatattttctttcatatgatctatgactcctttgactggttgatccacttctttatttataagaattatagcaaagtctgataattcaaacaataactcataataaatttaaagttatgccataataaataaaaaacgcaacatttcatataaaatgttgcgttttttatttgcaattattatttcggcagaacaaaaagaaacttaaccccaaaatctaaatttttttaaatccgttcagaaattaatggtatgaaaaatactgtcccgctcgtcctgagaaattcccagataacgctttgtgatataaaacgaggaatgattatacagatccatcagaagaaccggcgaaattccctgtttccatgcatgatagccaaacgtcttgcggagcgaatgacagctgacatgcgttacgcataaggtttcgtccgctgctctgcgtacaatacgatatgcctgggaacggcagagcggatgcgcaggtgtggtgggttttgaaaaaatataatcctccgcatcaggttttcttgttttccggtaacagtccagtgctttgataacgtgtgaatttaaggcaatctcattgacctttcctgttttctgttcatggatcagaagatgatctaagaaacagtctttctcaaaataatacacatctttccattttaaattcaatacatcactgatgcgcaatgcggtgtagagcccaagaatgatcatcgtatagttgcggatattcggatgtgcaacctcgtaatatgcaatgaaattttttagttcgtccttgtcacggatcggctgtgttgtacccataatgactcctttctgcggaaaataccgcaagcctgtaaacgcaacattttatatggaatgttgcattcagggagaaacagataatcagggaggaaaacagattatatgctcaagttaacgttaaagcctggtgactatattgacatcggtgaaaacatcagggtcgttttttccggcggttctgcaaataacattcatcttctggtggatgcaccgagagagatgaacattgcgcgcagttctgcagaaagaaaaagcaaccgtactcactactataaggaacagggcatttcggaacaggcacagaaagagatcgctgcaattctgatgagggagcgccgcagcagatcagaagaagcaaggtaataaggtcaggctaacctaggggtcgggcttattataaatctttttaagacgtatgtcttaaaaattaagaaaaatttccgcatatcacggaaaaaaagggaaaggattcccggatgccgggcaacggcagaacacattttttatcacacggaggtaaatattatggcaatggtagtacagcacaacatgtccgcaatgaatgcgaacagaaatttaggtgttacaacaggaatgcaggcaaaatcatccgagaagttatcttccggttacaagattaaccgtgcagcagatgatgcagcaggactttctatttctgagaagatgagaagccagatccgcggtttaaataaagcatctgacaatgcacaggatggtatctctttgatccagaccgctgagggcgcattaaatgaatcccactctatcttacagagaatgagagagttatccgtacaggcagccaacggtacagagacagatgacgaccgcgaggcagtacagaacgagatttcccagttacaggaagagctgacaagaatttctgagacaacagagttcaacacgatgaaattgctggatggttctcagagtggaagtacatcttcaaccggatcaggtccgaagtttggtgttgtagatgcaacattagacggtgcacttgtaacatctaacgtgaaaggtattaaagtagcaacagcagcttccacaacaacaaaggcaggtcaggagactgctatctggactgctgatggaaagacattaaatttaaatctttcgaaaaataaggtatatacacaggacgaaattgatgaattgatcgcaaatgcaaaacaggaagacagttctgcaacgggtgcaccggctgaagtgaaagtatctttaaagaatggtatttttaatgcagatgcagacacaactaccggaactgcaacagccggtggtgtgaaggcagtatctgatgatggaactgtaactggatttgttggtgcagatacaatttcatttacggcaaataagtatggagcagagttcaatgatactgtgtttaaattcgcattcgataaggcggcaggcaaagaagaagtagagacaaatacagcaattgaaatcgatggaacaaatggggtaacagcaggtgaatatacaattcatcttgcagcaggcaaagaatatacggcagaagatttagaggatattcttaaaacggcaggattcgactttgatgttaaattaagtggaaatacaccagatgagccaaatactttatttgcaaccagtggcgcatcatcggtgagcgatattacaatgggtaatgccaccgccggagctggtcttggaagtacagatgctatgtgggggcaggctggttatgacagtgtatcttctggtgccggcattaccttgcagattggtgcaaatgaaggtcagaccatgagtttctctatcgatgacatgagtgcaagagcacttggcgtagatggcaacaaagttgatttaagcacacagtctggcgcacagaaagcaactgataccattgatgcagcaatcaagaaagtatctgcacagcgtggtaaaatgggcgcgatccagaaccgtctggagcacaccatcagcaaccttgatacagcagcagagaatacacagactgcagagtcccgtatccgtgatacagatatggcagaagagatggttgagtactccaagaacaacattcttgcacaggcaggtcagtctatgcttgcacaggcgaaccagtctacacagggtgtactctccttattacagtaattttagtaaaacagtaattatcatatgcaacatgaaaatgtcccggggcatcatgctccagggcatttttcatagaaagaggaaaaaatgaatctgttaaaaacaatgttttacgatgaatttgcatgtattggagcggagtgcccattgacctgctgtgggggatggatgatagcaatggaagagaaaacattaaaagattacaggatgatggggggagagattggaagatttgccagaaaaggtgtaacatataactctgatttacagagttatatagtgcggctgcgggatacggatggaatgtgcccaatgctgaatgaagaccagttgtgcgaaattgtactaaataaaggaaataagaaactatgccgtacctgtgcaacatttccacgggaaacagtaaggtcgtatgatacagatgagaaatatatctttctgggttgtccgaaagcagcacacctgttatttgaggtatccgggaaaataacttttatgtttgagcgcgatccggatttagatatggaagacattcctatatataatcatgtgatgaagatcaatcttgcagtgaggggggaaatcacagattttattcagaagtcagaacttccattgtggttccgggaattttatggggcttatacgatagaaaaaatgagttcacagatagctgaacaggattttgaagcagtaggggaaaagctggaacatttttttaaaccatcgttttaccaggcaatgtatcaggggataaagaatacaaaagttaacagagaacagcagttccagtctctgtgtggaacggtaaatgcctatgaaaaatttattctcggatcaatgttctccgataaatccggtaccagtgataaaatattgcaattacttcatttaaaccggagatgtacatttgatgaatggaatcatgccagagaagagtggacagcacaggaaaatgaacagcagtgggaaaacatgcttgtgtataactggatgcgttctgcctttgcaccccagaagaaccgtaaattattaaaaaattatcttgcatgtgtattatgtaatttagtggcggcgcacctgttgattttatattccatgaaacacgaagcggatgcggaaataagaaatgtgatcgttgcatttgttgtccgcagatttttacatggaaatgaggaaattatgaagattatgcagcttggaatggacgagggggttttgtctcctgcttttttaatttgtctgtgcaatttatgggggtaaatgttcagaggtatttggtaatgggcggaacacgcagaattatgcgagttatcgcccatttttgtgcatactgcacactttgaatgccagacttttgtgtgaaattacgtttttatttgccaaatgtaaaatatggatgggtgtctgcaggtattgcaacagaatttgatatgaatgaagctgtaaaagtctggatggaacatagaaccgctttgtggtaaaattgatgccataagatcgttgctggactaactgacagggagtgaacagtgacatgcagacagggaggatcagacaatgtattatgtaccggatggcacagagatgtgtggatattatgaatgtaaagaatgtggaaaccggtttttggcgttacagacaggaccgcagctcgtatgtccgtattgtggggaagagccggatatggaagtcggaccggacgaggagatgccggtggcagcagaaagtgcgaagttgattcaggtggtaaaaggagcagaagaggttgagcggatggatacgctgctttcacttgcagtgaccggtggtgattatgcgtggatatagaaaaaaggagtcagtgtgaaaaataagatttttcacacgcaggaatggagaataaaatgggacaggtttattttgtccgccatggacagacaatttggaatgtggaaaataagatctgcggtgcaacggatattgcactcacggaacttggacataaacaggcggttgagacagggaaaaagatcttagaacagggaattaaagccgatgagattctttattccccattgatccgtgcaaaggacacggcactccatatcgcagagattaccgggattccggcaagggaggaagcacgtttaaaagaacagaactttggaaaatatgagtctacaccgagagacggagcagagttcagggaagcaaaaaaacagtttgtaaattgttatgaaggcggggagtcgatgcttcatctggcacagcgcatttataacctgttagatgaggtggcagcttcggataaaacttatattctcgtggcgcacaatggaatcgcgcgtgtggtgcagtcctatttttatgagatgaccaacgaggaatacgccgcatttggtgtggcaaattgcgcagtggtcagatatgaattttaaaagatgggacagctgtaaagcgtgtcaccggaatggaggactttcatgttaggaaagagaaaaggaaaacagcggagagaatatgtccgggattatgtactttatgatcttgaaaccacggggatatcaagtctgtatgatgaagtgatagaaatctcagcggtaaaagtaagaaacggaaagatcgtggacgagttcagtgaacttgtaaatccgggcagaccaattccttatgcggcaagcagcgtgaataatatatcagataaaatggtggaaaatgcacgctcctttgaaaaagtcttaccggaatttcttgcatttgccggggatgatgtgttggcagggcataatatcgcaggttttgatatgaagtttttgtacagggactgcgaaaaatattttgggcagacactgacaaacgactatatagatacacttgcgatcgcaaaactgtgttttcccgaatggaaacacagacgactctctgatctggcggaacactatggtatctctaccaaaggggcgcaccgcgcactggcggactgccgtatgaaccagcaggtgtttgagttgatggcgaaagaatcaggcggaacatctgcaaaacagacagaggagaaaatctgtccgcgatgcggacttgccttaaaaaagagaaacggaagatttggcgggttctggggatgcaccggtttcccggattgcagatatacggaaaatatataaaaaagaaagaattgtgcagtgtgaaaaataaaattattacacgcagaaatggagatgaaatggaagattacagcattgcaaatacgaccaaagaacagcgcattgcgctgatcaggcagtggatcccggatgaggacgggcttggtgacagtggtgatatggatctgtgggatatctacgcagattatatcaacggaaaaagagaaattgctgagatcaatgcagagatgtcaggcacttattatacagaggaggacttaaagtaatggaaacctggttttatgaagtggttacgatcgacggggattatgcgaacctgcgcagaaccgacatcgagtcggatgatctgaaacttgtggcacgcgctctgcttccggcggagatcctggagggcagcaagttaaaatatgaattgatgcagtatgaactgatcggttaaaaaggatgtcaacatgatggacaacgaaaaaataatcagaaaaaaggtatttgtctatggtgcagttcagggcgtcggtttccgttaccgggcggaacacgccgcaaacatgcttggtgtgactggctgggtaagaaatgagccggacggatccgtattgttggaggtgcaggggacggacgagcagatcgacaaagtgcttgcgatggtaaaccagggcacctacgtaaatattgaccgtatcacggcaaatcagataccgatcgaagagagagagtatggattctacataagataaactctgcctttctaattgagaaagtggttctatattcgaataaggtcatgccggtgtattttttagtaatccggttcagatagtcaccgctgtaactgagcagaccagcctggatggaaacaataactgtaaaaaaacggatagtgcaaaaaatgcattatccgttttttgtcaaaaaaagttgaagagcgtcgttaaaacactaaaaatatacatttgtaattgacgtgtattttacaaaacattaaaataaaaatggtgaatcacgcaaatataaacgaaaaaggaatgatagtgtgaaaaataagatttttcacacgcaagatttgtgcttacgcacaaacttgagatgcgcaaaagacagcgcaagaatggagattaatttgaaaaagtacattgcggcaatagggatatgttttatggcactggaggcagcatgcattatgaaaacggatcctgaggaggtgggagaagagctgccagaacttatcatcggaagtgataattatgagccatataattatctggatgacgatggaaagccggtaggtattgatgtggaactggcggaggcggtgtgtgaacagttaggatacacaccggtatttcaatatatcgtatgggataaaaaggatgaatatctggacaatgggaaggtggactgtctgtggggaagctttaccatgaatggcagggaggatgagtatcagtgggctggcccatacctttacagcagacaggtgattgcagtgcggacggacagcaaaatcagaaacatatccgatcttgcagggaaaagggttgcagtacaggcgacaacaaaaccggaggaggttctgttagagagaagtgatccgagagtcccggaggtggatatggtgtatagtctgtccggcatggacgagatctatgcaagcctcaggaaagggtatgtggatgcgatcacaggacatgaaagtgcgcttgagagatttgttgggaatgcaccggatatgtatgccatactggatgaaagtctgtatatttcagaactgggagttgctttcaaaaatgacactcatcaggatctggcaaaaaaaatgacacagattttaaaagagatgcaggatgatggaacactccgggacatggtagaaaaatacggattggatgccgaaaaagcactgggggtcacaaatgctgaataatgaaaagataacaaagatcatcgcccgcagatatatatggctgccatttttgatgggagtgcttttagggatagtatgttttgtggtatttaccgggtatgaccggatgaaaattgagaaaattgcagatgaaacactcgattttatgcaggaccgtgtcaaaaaatatgatgactacaaaaataatgataaagtaaagagtctttatcgtctggcagataagacattggagctggatcagcggttggaagagaaagatgcagatcaggaagagctggtcgaacgctatatgaaagatcagagattagatggtgttctgcttatagacgaaaatctgaattgtgtgtatcaggcagaagatgttggaaagatggatacattctggcaggaacagatgagtgaaccggcagtaaaaaatatgttggagcagccgcggaaaacatatatcacacggcttgataaagagggggaaaactatgattttgcggtggtatccaggacagacggaaaagggctcatcgccgcttatattgaaaaagaaaaaagcatggaagacaacggtgatatttccatccactcgctgtttaccggatttacatttgatatgaatggtatcgttgcggtgacagacgacaaacaagtgcttagttccaattcggagaaactgctttctgtgaagccgggggagtatcatgatatttttacaccggacatatatacaggggatgagcacaggatgatccatctggaaagtacgggaggaagctggtatggggagatcaagcagatgaaagattatacactttatgcatttttccccaaaactgcgatatatgcactgcgtacaaaggttgtgatcggtaccatgggtgtatacatattgtgctggatgacatttatgctggtacgggggtatgtggcggaatcgaatatgcgccagatggaaaaacagtatcatatcatccaatctgtcagcagtgtattttctatctgtatgctgttagatctcaaaaagaatacatgggaaatgatcaaagcatctgaccagattcggaaaatgaccggcaatgagacaaacactgctaacatgatgaaatttttctgtaaaaatacagttgcgcagtcagaacggcagaaattttgggactttgtaaaccctgatacacttgcagagcggctgcagggaaaagattatatcaattgccagaccgaaatcggaaagggagaatggttcagcatcatgctggtgccgcagcatcatgacgcacatggcaatgttgaggcggcgctttttctgagcagaaatattaccgacgaaaaaatgcgtgagatggactatcagaaaaaactggaaaaatcggtggaacaggcagagcaggcaaacattgcgaaaacggatttcttacggcggatgagccacgatatccgcacaccgatcaatggaatccgtggtatggtggatatatgccgttattatatcggaaatccgaaaaaacaggaggagtgcctagataagattctgctttcatccacctttctgatggagctggtcaatgatgttctggatatgaataaactggaatccgggcagattaagctggaggaaaagccattttccatttctgaaatattaaaagaagtggagacagtagtcgggatggcggcaactgaacagggaatcacactgacggtaaaaaaaggagagatcaaccatgaaaatttgcttggaagctctcttcatgtccggcagatcttacaaaatattacttcaaatgcggtaaaatacaataaaccaaatggaaaagtgattttggagtgccgggagctgccgccgaaaaatgaaaaagccgtgtttgagtttgtgtgtaccgataatgggatcgggatgagcccggaatttcaggaacatgcatttgaaccgtttgtgcaggaaaacagttcagcacgcacttcctataccggaaccggacttggacttgcaatcgtaaagaaactggtagaacagatggaaggaacgatccacttcgtgagtgagcctggaaaaggcacccggtttacacttgtgatcccgtttctgccggatgacagcatcgaaatgcagacggagcagacacaaagtaccgatgcagtaaagggaattgaaaatgataaaatactgttggtggaagattatgagataaatatggaaatcgcccggtttgtgctggaaaatgagggggcacaggtacaggaggcatggaatggcaaagaagctgttgatctgtttgcagcatcagaaccgggtggatatgatgtgattctgatggatctgatgatgcctgttatgggcggtctggaggcagcgcagtgcatccggaaactggagagagaagatgcaaaaaccgttccgatcatcgcgatgacagcaaatgcatttgcagatgatgaggagcggagtctggcagccggcatggatgcgcacatctccaaaccattggatgcagaaaaactcattcaggtaatttctgatatatgcaaaaagcggaaagagcatgcaaaaggagatgcagatatctgatctctgatgtccgaaaaaaatgcagttccgatttgcacaaaggtactttattatcagtaagagatgtagtatacttcttctgcgaaatatacaaagagtgaggacaaaagaaatgcagaagaatcttggaaagatcaaacgtaccgtggaagagtatgtggtgctgactgttgcaacactgattcttgttgtgggagtgtatgtatttaaatttccaaataatttttcgtttggcggagtaaccggtctggcagtcgtgctgggtgccgtacttccgacatctccgggaaatcttacctttatcatcaatatgctgttgctggtacttggatttatattccttggaagaggatttggagtcaaaactgtttacgtcagtgtactgacatcggttgggttaagctttgcggagcgggtgtttccgatggatgcgcctctgaccggacagccggtattagagcttatctatgcgatcgtactgccggcattttccgcggcaattctgtttaatatcggagcgtccggcggcggaacggatatcgtggcaatgatcttaaagaaatatacgaagctgaacattggagcagcattatttttagtggatcttggaatcgtcgttgcatcctgtcttgtatttgatgcgcagacaggtctttgttccatgtgcggtcttctggcaaaatctctggtagtcgataatgtgatcgagagtatcaacctgtgcaagtattttacgattatatgcaacgatccggagccaatctgtgaatttatcacaaaagaattaaaccgcagtgctacggtttatcaggcagaaggtgcttaccagcacaatcagaagacggtgatcttaacggtcatgaagcggagtcaggcggtagaacttcgtaattatatccgtatgaaccagccatccgcgtttattgcaatcacaaacagcagtgagattatcggaaagggtttccgtggtttcaactaaggtttggttgcgggaatgagaagtctattatataatatagagagtgggttgcgtatgtgaaaagttatgcatatctgaagatggtatgagtacaaaaccgtgatgcagctattttataagataagaaatggagaagcgaatgaaaatttgggaagatgataatcagaaatacatcaaggcgatgatggagaaaaataccacagagcagaatgagaaactgacaaagcgattagaggagattgatttttcagtgttagaacacattgaaagaaaagaaactgtcaatgagcgcggtgtatttgctccgttagatgcagtggaagttagcgagatcgaggcaagaggggctgaattcaaagaactcggtttaaaggcgatccgtgagggaaaagtcggtgcggtgcttttagcgggcggacagggaacccgccttggacttgaccggccaaagggaacattaaatatcggagtggccaaagagttatatttatttgagcagctgcttcgcaatctgatggacgtgacagatgaggcaggagtatatgtaccgctttatattatgacaagcaatatcaacaacgcagatacgacagctttttttgaggaacatgattactttggttatccgaaagattatgtgaaatttttcgtacaggaaatggtgccggcatgcgattatgagggacggatctatatggaatcccagactgaggtggcaatgtctccaaacggcaacggcggctggttttcatctatggtaaatgcaggacttctttctgatatcaaagaaagaggtattgaatggatcaacgtatttgccgtagataactgcttacagcgcatcgcagacccgatgtttgtcggcgcaaccatcgcttacggatgcgagagtggtgcaaaagtagtacgaaaagctgcaccggacgaacgtgtcggtgtactctgtacggaagatggcaaaccttcgatcgcagaatactacgagatgacagaggagatggcaacggcgcgcaaagaaaacggtgatttaaaatacggttttggcgtaatcttaaactatctgttctcagaaaagaaattagagcagatcgcagacgcaagaatgccgatccatgtggtagagaaaaagatcccatacatggatgtggacggcacatttgtgaaaccggagcagccaaatggatacaaattcgagacactggtgcttgatatggtgcacatgatggatgactgtatcccatatgaggtagtgcgtgagagagaatttgcgccgatcaaaaaccttcacggcgtagattccttagattctgcaagagagctgatgaaaggctgcggcatcgaattatagaaaatagaaccctgtttttaaattgtttataaatatttcatacagactttatgccgtttctggcggtatctgttatactaatatttatagtgagagacagttacgctcaacagatgctatgcgaaaagacggcgtgacaatgaagaagaaaacaatttagaaacggggttttttgttatgatacagagacagacacttgtacaggatgagaaacagcaggagcagtatgaggcttctgtggaggtggaagatgcagaagaaacagcggatgcagcgcaggaaaacagtctgatgttggtgcgcggcatggtcgatgatgacatggagcatatcgcggatatgaaggagcagttttcccagacgattgatccgatcctgcgcatgtacaatgcggcgatgtgcgcgacgaccgcgcggcttgagatcatagaggacgagttcaaataccgcaaactgcgctgcccgatccatcacatcgatacgcggctgaaatcggcgaaaagcattctgggaaagcttcagaaaaaggaccttgatctgacactcagcgcagcgtgcaacaatatttacgatatcgccggagtgcgcgtagtctgttcctatatcaaggatgtatatctgatccgtgaccgcctgatggcgcaggatgacatacatatcatggagatcaaagattatatcgagcagccgaaaggcaacggttaccgcagcctgcacatcattatccgtgtgccggtctattttatgaacaaaaaacagatggtgccggttgaactgcagatccgcacccttgcgatggatctctgggcgagcctggagcacgacatcaagtacaagtcgctctatcaggacgtcacgatggatttttcggacgaactgaaagagtgcagccgcctgatctatgaggcggaggagaagatggaagtcatgaatgcagcgctggaggaatgaaaaaaggcgtgttttcgcggttttgcagatttcccctgaaaaaaaatgaaaaattaaataaagttattgacaaataaccaaagttagtgtaatctaactatcagaaaaggaaatgagttctagcaactctttcttttttaaacaggagttaggataaactaactatatatgttaaaacaatggatcgagagatctgttgttctatgggagatgaccatgagcagggaagtgttagagattctggagaagatggataaaaaagaattaaagactcaactggcactgcaatgtgccccgcttcttacgggaatcaaactgtcaaatcttcttacggtgacaaagagcaacgaagaagatgtgaaagatttgttccgtaatacagaaattactgtacatacactctaccagacaaaacatcgtacaatattcctgctttttcgtgaaaaacaactactcgcttatctgaacgaagaagatgtgaaggaaacgatgagattgtttgggtatcagacattacgccttatcgacatttttgaaaaactgtgtgcccgctatcaaaaatatatgaaggatcatctgtcttttccacatgagcttggactgctcttgggttatcctgtagaagatgtgttaggttttatccgaaacgagggacgcaattacctatattgcggttactggaaagtatatggagatgtggatgcggcaagaataacatttgaccgctacaatcaggcaaaggaagacgcgatccgcctgatatcgtccggcatggaaatccatgaacttctgctttacggcaagatgttagagtctgcctagatggactcatgataacagaatgtttacaaaagcatattctatcatttgatgtatgactggattttcagatgaaagtaaataagataaaaacggaaaacacccggcttgatgcggcaaaggcgtcgtgcgagaccaggaatccgtttgtataaaatgaatgtgcaaaaataagcacaggaatggaggaaatatgagcaagattatcgtggcatactggtcccagacgggaaatacggaagcaatggcaaatgcagttggagagggaatcaaggcagcaggcggagaggcagacgttgttccggtatctgcagtatccgtagatgagttaaaagctgcatcctcatttgcattaggctgcccggcaatgggagctgaagtattagaggagagcgagatggagcctttcgtagaagaggtagaaggctttgcagcaggcaaaaagatcgctttattcggttcttacggatggggtgacggacagtggatgcgcgactgggaagaacgcatgaatgcagcaggagcaactgttgtaaatggtgaaggtgtgatcgcacatgaagcaccggacgctgaagcattagaagcgtgcagaagtcttggaaaagcgcttatataaaagaacataaaaagtaaggttcagagaaatcagaataataagtcaggcaggtcggatacgacctgcctgtttgtgttaggttgaatttatcctaaaaaatgtgtatactattgtaaaaagattatggaggtgttcaaatgactatagatacaaatacaatggtttcaatttccgaagcaaaccagaatttttctaaggttgcacgactggtagatgaatgcggttcagcagtaattttgaaaaacaatgtaccaagataccttgttatagactttagtaaagcggataaagatatgatagcatctgatgatgatgtattgagtatttcgaagcagcttatggaacagaatagggaagcatatgaggtgctggctaaatgaaaaaattgagcaaagagcagatccttatgcttcatactcaattaattcagcagactggtggaagcgatggagtcagagattataatttattggactcggctttggaaacgccttttcaatcctttggaggggacgaattatatccgacaatacaggcgaaagctgcaagattaggatatggactgataaagaatcattgtatgatagatggtaataaaagaattggaacacatgcaatgcttgtatttcttgcgttgaacgggatagaacttaaatatacgcaaaaagaattatatgaaacaattcttaatgttgcatcgggaagcgtagattataatggtttattgcaatgggttcttaatcatcaaaattaaatagtaaaacgggtataagaccgaatatagaaaatattgaaattttgtgttcggtctattattcatgacaatagcattgtccaagaagtgcacaatctatgattgaagttgataaaatggggattatgatgttaaaaaaatttgtaaagtatgtctcgcagaacatgcttggcatggtaggtatgtctgtctatattctggcagatacctactttatttctgttgcggtggggacggatggtatcaccgcactcaatctggtactgccggtctacaacatgatctttgccatcggggcaatgatgggtgtcggttcagcgatccgtctggtgatcgagcggaatcaggaacatccgaatgcagacggatactttttccatgcactgtcatgggcattgattgttggcctgatttttacacttgtaggaatatttttcccggataaattgatcgccatgcttggcggggatgcagagatcgttgcggttgggaaaaattatacgcgcatttttatgagttttgcgcccttttttatgtggaattatatctgcaatgcatttgtgcgcaacgatgggaatccgtcgatcgcaatggctgcgacattattcagcagtctgttcaatattgtgtttgactatgtactgatgttcccactgggactttccatggaaggagctgcgcttgcaacggcactttccccggtggtcggcatcctgatctgctgtatccatttccgctcggaaaaatgtacggtaaaatttaagccgatgctgccatctttgcgaaaaatacttttctgctgtcagtttggtgtgtcctcttttgtgggagagatttcatccggtgtgatcacggtcgtctttaatatgatcatccttggacttgccggaaataccggagtggcggcttacggcgtggttgcaaacacatcacttgttgcagttgccctgtttaacggaattgcacagggctcccagccgttagtcagcgaggcatatggcagggatattcataaagatgtgaaaacttatttaaaaatggcggttacgactgcagtaggcgtctctgtacttctggttatttttatttacctgtttgcacctgtggtgactgcagtgtttaatggcgaacataacaggacgcttgctgactacgcagaaactggactgcggatctattttatcggatttttatttgccgggatcaatatcgtagggactgccatattaagtgctgtcgaatctacaaaatatgcatttgcagcgtcgatttcccgaggttttgtggcgatcattttctttgcatttatactgtccgcaatatttggattaaacggggtatggatggccttcccggcggcggaatttgtgacaatgctgatcacactgtgtggattgcggagaataaagtttgttgataaaaattcttaacacttagaaaatctcttgacaaaatgcagatcgtggtgtaaattcaagatacccaataggggtatatggtatacaataaaatggtaaaaccgtgataaaaaatcagggacagcacagactatacagaccggaggtagacagatggcatgtgaaaaatgcagcgcaaatggagataatgtgaagcataaacagcgtgagagtgcagaaaaaaaggcactgcttacgagactttcccggatagagggacaggtgcggggagtgcgtgccatggtggaagatgacagatattgcgtggatatcgtcacacaggtatctgcgatccaggctgcattaaacggatttaacaaggagctgttagcacgccatattaaaacctgcgtttccgaagacatcaaagaaggcaatgagcaggctgtcgacgaactctgtgaactgttaaaaaaattgatgaaataacggtttgtatttagaaatggagattgacatgaaggaaaagtttgacgtaacaggcatgagctgttcggcatgttcctcccatgtggaaaagagtgtttccaaactggagggcataaagacagtcagtgtcaacctgctgacaaacagcatgcaggtcgagtatgatgagacaaagcttgataccggaaagattattgaggcggtggaacatgccggatacggtgcctcggtaaaagaagacggaaaagcagcagtaaaggcgggggagacggaggatgccgtttccatccagcagaagaatatcaaaaacatgaagacaagactgatcatatccgtgatatttctgataccgctcatgtatgtgtcgatgggacatatgatctacaacgcgcttggcgttccgatgccgccgcttaccatgaagtttttccatggaagtgaaaatgcagtcatttacgcatttacgcaattcctgcttttacttccgatcctgtttgttaatcagaaatatttccgcaacggctttacaacattagcgcgcaggagtccaaacatggacagtctgatcgcaatgggagcagctgcggcgacggtatacggtatcttcgcgatttaccggatcggctggggattccgtatcggagacatggaactggtacatcagtacagccatgatctttattttgaatccgccggaacaattcttacgctgatcacggtcggaaaatatcttgagacgaagtcaaaaggaaagacgagtgaggcaatcacaaagctgatgaacttagcaccaaagacagtgacagtcgtgcgcgacggcaaagaacaggtcattgatgcggcagatgtggtacagggggatattttcgtgatcaagccgggagagtcggttgcggtggacggtgtgatcttagaaggaaaatcctcttttgatgaatccgcgatcaccggagagagcatcccggtgttaaaacaggaaggcgataaagtaatctctgcatccatcaataaagccggactgatccgtgcgcgtgcaacgcgtgtcggcaaagatacgacgatcgcacagatcatcagtcttgtggaggaagcatcttcgagtaaggctccaatcgcacgtctggccgataaaattgcgggaatctttgtcccgacagttattggaatcgcgatcgtaacatttatcttatggctggcaagcggggcagattttgagtttgcaatgtcctgcggaattgcagttcttgtgatctcctgtccgtgtgcacttggacttgcaacaccggtggcaatcatggttggaaccggaaagggtgcggaaaacggtatcctgatcaaatcaggagaggcattagagacagcacatattgtggataccgttgtaatggacaagaccggaaccattacttatggaaaaccggttgtgacggatatcagaacctatgcaggaatttcagagaacgatctgcttaagattgcgggcagtcttgagaagggaagtgagcatccgttagcggaagcgattgtctccgattgcgggaaaaagaacatcgttccggaaaaagtaaatgactttgaagcgctgtttggaaaaggaattaaaggacgtttatcctccggcagactttactatgcaggaaatgaaaagctgatggaagaggcacacgttgccctgtccggtgagataaaaaaagagatggaacaatttgcaaaacagggaaaaacaccgcttctgtttgcagatgaaacacagatcataggcgtgatcgccgttgcggatgtcgtaaaaccgaccagccgtgaagcggtcagacagttcaaagaatacggaatccatgtcatcatgttaaccggtgacaatgaagtgacggcacaggcgatcaaagatcaggtaggaattgatgaagtcattgccggagtgcttccgacacagaaggaagaaaagatatccgccttaaagaacagcggacataaagttgcaatgatcggagacggtatcaacgatgcgccggcgcttgcttccgcagacgtgggaatcgcgatcggggcaggtacggatgtagccattgagagcgcggacatcgtcctgatgaaaaatgacctgatcgatgcggtcggagcgatccgtttgagcaaagcggttatccgaaatatcaaggaaaatctgttctgggcatttttctataacagcatcggcattccgcttgcggcaggacttttatatccgatctggggattaaaattaaacccgatgtttggtgcggctgccatgagcttaagcagcgtctgtgtagtaagtaatgcactgcgccttagatgggtaaagcttggaaaaaaatcttcatccggaaatgagacaggtaacatggaacaggagagtgcggtctgtgaaaacagagcggttacttctgaaataaaaacaaaaagtgatgtatcagaaagcgaggaacaaacaatgaaaacaacattaagtattgaaggaatgatgtgcggacactgccaggcaaccgttgagaaggctttaaaaggagtaccgggtgtgtctgaggtagtggtgagcttagaggacaaaaatgcagttgttaccgcagaggaatcagtcagtgcggatgcattaaaagcagccgttgtagatgcaggatatgaggtaactaacattcagtaaggaattgttacgggcacagaaattgtattttgcagatcaaaaaagataagcataaaagagaaggggaggccgtggttactcggcttccccttcttctacgatctgctctaacacgcggatcagatcctgcatgttattaagctctacatttcgctcgaggatcagatttttcagatccgttgaaagtgtctcgaatttgtctttgatgccaggtgctacataagatgccatatggtcctccttttatttccggcagcagatttgcctgcgggacgtgtaatctattgtttttgtgtggttacctgtttatcatgtacaaaaatttcaaaaaatatgccgtaaaaaacacttcttgtaaaaatcgccgttatcctttaatattaaagaaggcatatagccgtattggaacattataaatgaaagaatggaaacaccatggattattacagcagtcagatcagtaaattaatacaggaattatcgtctcttccgggaatcggtgcaaaatctgcacagcgtctggcatttcatattttgaatatgccggtggaacaggtcgaagaactttcgtctgcgatcgtggatgcaaggaaaaatgtccgttactgtaaggaatgttttaccctgacagatgatgaactgtgtccgatctgtaaggatgccggacgtaaccacaagacgattatggttgtggaagataccagagatcttgcagcatatgaaaaaaccggcaaatacgacggggtttatcatgtcctgcatggggcaatttctccgatgcttggaatcggacctgcagatatcaagttaaaagagctgatgcagcgcctgcaaaaggatgttgacgaggtgatcattgcgacaaactcaagccttgagggagaaacgacggcgatgtatatcagcaaactgatcaaacctaccgggatcaaagtgacaaggatcgcaagtggtgttccggtcggcggagatttagagtatattgatgaggtaacactgctccgtgccttagaaggcagaacggagatttaataaaaggaatagaaaggaacatgactagactatgacaaatctggaacttgaaaaaacagcgaacgaagtccgcaaaagtattgtaactgcagtacacagcgcaaaagccggacatccgggcggatcactctccgcagcagatatctttacttatctgtattttgaggagttaaacattgatccgaagaatcctaagatggcagaccgcgaccgttttgtgctttcaaaaggccacacggcgccgggactttatgcagttctggcagaacgtggatttttcccgaaggaggatcttgtcacactgcgtcatacaggctcttacctgcagggacatccggatatgaaacacattccggggattgatatgtcatccggttctttgggacagggactctccgcagcagccggaatggcagcagccggaaagtttgacaaaaaagattaccgtgtctatgcactctgcggagacggtgagatccaggaaggccagatctgggaagctgccatgtgggcaggattccgcaaactggacaatctggttgtgatcgttgacaataataaccttcagatcgatggaactgttgatgaagtatgttctccttacccgatcgacaaaaaatttgaggcatttaatttccatacgatcaatatcaatggaaatgactttgatgagattcgtgctgcatttaaagaggcgcgtgagacaaagggaatgccgactgcgatcattgcaaagaccgtaaaaggaaaaggtgtatcttttatggaaaatgccgtagactggcatggaaaagctccaaatgatgcagagtatgagatcgcaatgaaagaccttgagaaagtgggggaagcattatgtcagaaataaaaaaaattgcaacaagagaaagctatggaaatgctctggtagaagtgggaaaagagcatgaagacctgatcgtattagatgcggatcttgcaggcgcaacaaagactggaattttcaaaaaagcgttcccggagcgccactgggatgtcggtatcgcagaggcaaatatgaccggcatcgcagcaggacttgcaacctgtggaaaagtgccgtttatcagctcttttgccatgtttgcggcaggaagaaactttgagcaggtgcgcaactcgattggatatccacatctgaatgtcaagatcggtgcaactcacgcaggtatctccgttggtgaggatggcgcaacccatcagtgcctggaggatatcgccctgatgcgcacgatccctggcatggtagtcatcaacccggcggatgatgtagaggcaagggctgccgtacacgctgcatatgatcatgcaggacctgtatatcttcgttttggccgtttaccggttcctgtattcaatgatgaggcagcctacaaatttgagatcggcaaaggaattgtcttaaaagaaggaaaagatgtgacaatttttgcaaccggactctgtgtgaatgagacggtagaggcagaaaaaatgcttgcaaaagacggtattgatgcagagatcatcaatatccacaccatcaaaccgatcgaccgtgaactggttgtaaaatccgcgttaaagaccggaaaagtcgttacggttgaggaacactctgtgatcggtggacttggaagtgcggtatgtgacgtgctctgcgaggaggctccgacgaaagtcttaaagatcggtgtcaacgacgtattcggtgagtcaggtccggcattagagctgcttcataaatatgagcttgatgcagagggcatctacaaaaaagtaaaagcatttgtaaaataataaaagaaatccaaaagagagactgctgtcattacggaaacgtatgcagcagtctttttctgtcgaaaagtttttgaaaaactggccataaaaccacaaaaaaatcggacatgctgtgataccatttcacaataaaaaaagctttttaaatttaaacagggaggattggaatgattgagattatccgggaagaaaattgggatgatacgaaagaaaaaaagctgccaaaagatatcagacagattgggagaccggatgttggggagagaatatacatagaggatgaagtatacaggtatctgcatccatatgagagcagctgtgaaaaacttgtatatgttttgcttggaagattcgaaaattacagtggaagacagtgcacatttgtggaggcagcaatacagctggaacatttggaatttgatgcagagattccaagatggagcgaccatgaatgggcgtatatatataaacggttaaaagatgagtatgacagcatggtcattgtcggatgggcattagatcacagaggatgtctgccgaatatgacaaaacagatcgaacagtttcatcagacgcattttggcggcgttcatcagacattgttcttaatggataccctggaaaaggaggaaacatttttcagcatccggaacggacatctgtaccggagagaaggattttacatatattatgacaggcacgccgcggtaaaattaaaaaagatggaacacagggaagaaaaaacagaagaagtaaatttgccggagacagacgaggttacattcatgcagccggacgagcctgtttacgacataaaagaaaaggaagatacgaatgatatcgatatcctggaagaagaactctatatggaagagagtatgcagccggacgagcccggactgcagccacatccggaacgaaaaagacaggggcgttatcggaaacaattggaagaagcggaaaaaacggaagaggcaaagatccctgcatattcctccctcgtattggctgtggtggtactgactcttggttttaccgcttatcagaaccataagaagatgaatgagatggaaaatactctggcacagatgaatcaggtacatatcgtgacagaaatgccggaaacagaaaaaacggcagattctgggatcgtggtggaaaatattgcagggaatatagaaaaacagacggagacaaaacaggcggatgaacatagtacgcagacagaggcggaacagcttcaaacaaatggaacgcaggcggcggaggcatccgcaccggatgaaacggcagggatacaggcaggaacggaattgtcaggaatgacagatacagaagaaactgcagaaacgtctggaacagcagatgcccagaaaacgatggagtcccaggaaacagagagtatgcagaatcgggagggagaacagaaggcggaagcggacacagatgaaacaaacagcaataaggaaaacgtaaaagagacggcggcacagccggatgaggcacagacatatttaaaacaggggtactatgtggtgcggcagggggataatctggctgcgatctgccggaaaatatatcagacaacagccatgatggacaaagtatgcgaggcaaacgggattgatgatccggatgcaatctatgcaggccagtatctgacgcttccgaattaacaaagcagccgcttctaaaaataagatgaaacatccagggaataatgctataatatcgaaagatcagtgtgaaaaaaagatttttcacacacaggatttgtgtttacgcacaaacttgagatgcccgaaatgggcaagaacgaggtttaagatgaaagagagattggtatggcggaaaaaaacaagagaggatttcatacggtagaagaaccggatatggaagagtatgaacgcaagctgcgtgaacatcgggtaaaagtagtcagaagaaccattattctgatcgttaccgtactggcagtttctgcgggactctgggtgtttatggcactgcgccattatgagaattttgacgtgggatcgtctgttgacagggctgatacggaggctacaaagtttgcagattttggggggaatattttaaaatacagcaacgacggtgctttttatacggatacggcaaacgaactgatctggaatcagacctatgagatgaccgatccgcagattgatatttgcgaagattacctgacaatctatgataaaaagggaactatgatctatatcatgacaaaggagggaatcttaggcggaatagaaacgacaatgccgatccagcaggtgcgtgtggcatcgcagggaacggtggcggttctgatgaaaaaagatgcttccggttatcttgcaatgtatgataaaacaggtgcaaaattaacggaaggagagattcacggtgcaaaaaaagggtatccggtcgcgattgcattgtcatcggatgccgtaagacttgcagttgccatgttggacatcaatgatggaagcataaaaagtacgattgctttttacaattttggaacagcaggagaaagtgaaattgatcatgtagtcggagcgcagacgtttccagataccgtgatcccggaaattgtttacctggcggatgacaggcttgcggcactctcggataccggagtgatcctgtttgagggatctcagaaaccaaaacaatccggaacgatcccttttgaaaaagaagtgaagagtattttctataatgataattatattggctgcgtgataagcaatgaggatgaggcagtgacacatcacataagtgtctatgatctggatggaaaaagcgttctggaaaaagattttacaatggagtatacaggtgtggaatttcttgcgaacaatgagatttgtattacaaatgaaaacgcatgtgatatatacaccatacatgggatatataaattccatcatgagtttgaacagacattgtataagatcatttcggagggtggcgcgctgaattatacattgatactggaagatacaacagaaaaaataagactgaaataaggagcatacatatgaactgggttttgctgctggtattgctgatactgggatacaatattataagaggatatagaaaaggatttttgcgaattgtgtattccctggtatcgtgggtcatagtacttacatttgttaccgttgcaacaccatacattaatacgtatctgatggaacacacgacactatatgaaaagattgagcagcagtgcagtgaacagataaaaagatccgtagaggaaaaacagagatccattcaaaatgaaagcagtccggataatcagaaattgtcacagtttgggattatgctgccggactcagtggtaaatgatatttttgagaagaccggaaatatggcgggagagattatagaacaaagtggcctgtatgatgagatagcaaaacagattgcagaatttgtggtagagggaattgcatttctgatcgcattggtcgcagcgtggaccatcgtgcatgtgatagcgcgggcgttaagaattgtttcacggattccggtactgagcggggtaaatcgtacactcggtgtatttgccggtgggatatacggactgatactggtatggatcgggttttacatgatagctgtgacaagtacgagcgaaatgggaagtgccctggttgcctgcatatatcagagcagattgttaaaatacctgtatgaaaacaacgtaattctgacactcattatgaattttttatagacagaaaaaaagtgttgacatatccggacaataatggtagtataaaagtccactgcgaaagacaagcacttttgctggggcgggaaaaagatacttgattgtttatcttttggaaaataaaaaaaattattgacaaacagaacaacacatgataagatatcagagttgtcgcgtttgagataacagatcggacaaaaccgattgagagaaaaactttcaaaaaatgaaaaaagttcttgacaaaacagacttgataagatataataaacaagctgtcgccgagaacgacaacgaaacaaagaaccttgataactgaacagtgaaataaccttgaaagattcaatgaatttcagggtgttgtgaataacaacacacgaacgtttctataa

SEQ ID NO: 5152 - DNA, 21187 bp, Unknown
  gut microbiota DNA sequence
cggatcgatctgttcggaaccggaaatgagacgcgtgattttatccatatttccgatattctgcgtgcgttagaactgatccttgcatatcagggaccggaggagatctttaacgtggcaaacggtgaagaagtatcgatccgtgagctggctgaaatctatgcaaagcagcttggagaaaatactgacatcgtgcggtttaacggggagacgaaagtcggcgatccacagaactggcgtgcggatatttccctgctcaaaaaaatcggctacgagaaaaagacggatcttaccgaaggaatccgcgaatatgtaggctgggtaaaacagcaggcatagaaagggcgaaaaagaatggaagagacgagaagtctggctccggtaattttgtttacctacaaccggccggaacatacaaagcgcaccatcgaggcacttgcagcaaacgaacttgcagcagaaacagatctgtatgtattttccgatgcggcaaaaaaagatgcagataaaggaaaagtgcaggaaatccgtgattatgtaaagtccgtgcagggattccgtcaggtggaactgaccgcaagggaacagaactacggtcttgcaaaaaatgtgatcgagggcgtgactgcgatcgtaaataaatatggaaaagtgatcgttttagaggatgaccttgtcacaaaccgctattttcttttgtttatgaatgacggattagaccgttaccagaacgaacagaaagtgaccggaatcacagggttctcccatttcggggatactttttcctacccgtgtgagtcctattttaacacgctctcaggcacaagctggtcgtgggcgacctggagcgaccgctggaagtatttcgatgcggactgcgacgactggacggatatggtttccgataaaaaactgcgcaaagcatttaattatgacaatacctatgatttttacaagatcatgaaaatgcagaaaaccgatgaaaagaccaactcctgggcgatccgctggtactggacgaatttccggaaacagggactgatcttatccccgacaaagtctttagtcagcaatgaaggctgggatggcaccgggatccactgcggcaatgaaaagggaccggtattcgaccataaactgatgacagatcacaggatcacagagttcccacaggagatctgtgaaaaaccggagctccataaggcgatgaaaaaagcactgatccatgagtcacagccgaatctgatcaaacggatctaccatgtggtattccggaaaaactatatcggacaggcatagaacatttgaatggcaggcaaaacaggctgtctggaaatgaggatgaaataaattatgaagatacttgcaatttttacctgttttaacagaaaagaactgacaaagcggggcatgacaacactctcagaaaatagagacgtcacgtttgactatgtgatcttagacgacaatagttctgacggaacgcgtgagatgttaaagcagatgcgcgatgacggcacatatcagatcgacctgatcgagggagacggaagcaatttctggaatggcggcatgcacaaggcgatcgaacacatcaaaaatacgcatatggattacgactactatatgctgatgaatgatgatacaaagttcttcccgggcatttttgatgagatggcaccacatctgaaaaaggatgaggttacagtcggtgcgatctgtggcgaaaacggcggtttgagttacggcggtatcaaatacactaaagggatcaaatacaaaaaattaggaccggatgcgccggaggtaaactgtgataccttcaatgcaaactgtgccatcattccgcgtgaaatctttgaaaaagtcgggatagatccattttaccagcacagtatcggtgattttgattacgggttacagatcagtaaacttggatataaaattcatatttatccaaagtttgtcggcgagtgcaatgataatacactgcagaaaacctggcaggatgagacgctgccgcgcatggaacggatccgtctaaaggagagccgcaagggacttccattccgcgactggttccattttctgcataaaaacttcggacttggaacggccattgtgcgttccattacaccgtatatccgtattatacttggaacaaagacgagatactccggcgcgtagaaagccggcatgatcatcgcaatatttgaatgaggatttatatgggaacgatctgttttgtgattttaaattataagacctggcgtgaggcggccgcatgtgcggagtccattctaaagacgcagcaggggcaggatatccgcattgttttagtggacaacggttccggcaatggcagtgaggagtcgcttcgggaagaatttgccggggaaaaaagagtgcatgtgatcgcaagtgagaaaaaccttggatttgcacgcggcaacaatcttggcatccggtatgcaaggtctcattttgagccggattttatcgtggcggcaaacagcgatattatttttgaacaggaagattactgtgagaagctgcgggaaatctataaggaagagcgctttgatattttaggcggggatattgtggatgcaagccgcaccagacattttaatccggtggcgagaaacaggcagtacacgttaaattatatgcggaaacagatcctggtttcctgggcgaaatgtaagatgttccagctgatcaaactgtttcatttaaagaaagccattgcaggccattatggtgtcgtgtcggatgaaacggggcgcgatgtcaaagatggcagtaagaatcttaccacgcgtgaggaggacggaaagtccgtatcggcggacagccgcgtggacgagcggatgaaggatgttctattacatggctgctgtcttgttttttcgaaagattttttcaaacagatggacggattttatgatgggacatttctctatgcggaggaggagatcctttattaccttgccggaaaatacggcatgacattactgtatgcaccggagattggctgcatgcacaaggaggcagtgtccacaaattttgtgatgcaggatttttgtgatgcgaagattttttatttcgggaatatcacgaaatcctatcgggcatttctggcactgatgaaaaaatatgagtaaacatgacggattatttcaaaattcagtttacaatgtaatttataaactcctggatgcgctttttccgctggtttctgcagcataccttggaagggtactgatgtcggatggagtcggaaaagttgcatatgcacagaatatcgcgcagtattttgtactggcagcatcccttggaatccccaattacgggatcagggagattgcaagaaggcgtaaggatgaggagcagacaaaggaacttttttcgtctctcttttttatcaatctgatctccacgctgatctgtacggcactgtattatgcactgatcctgaatctgccgtatttttcttcacgtaagatgatctcacttgcggcaggacttctgatcatatttaatgcgtttaatgtagactggttttatcaggggcaggaggcattcaaatatattgcaatccgcagttttgttgtaaaagtgatctcacttgcggcaatctttgtgtttatccggagcagtgaagattatgtgcggtatatgcttgtgatcgttttgacgacaggggcaaattatattatcaatatgctgcagttaagaaagtttggtatccgtctgacatgccatggcataaagatcctgccgcatatgaaaccgatctttatcatgctcggaacgacagtcgcgatcgaactttatacgatgttagacaccacgatgcttggacttttgtgtgatgaaaaaaacgttggttattatacaaatgcgatgaaagtcgtgaagatcatcattacagtcattacagcaatcgggggaacattacttccgcatttaagccagtatcatatggaaggtgatgatgaatcgtgtggacggatcgtaagcagggtatttgagatcatgctgtttttgttcctgccatgttgtgtggggctgatgctgacagcagatgatctgatggtcgtgatgtttggcgaaagttttgcaccggcaggggagacactccggatcgcggcacttttaacgctcgcgcttgggttcagcaatttatttgggacacaggtgcttttaacatttggagaggaaaaaaagcttcttttctgtacgatcgttggggcagtgtcaaatgtctgtcttaatttttccatgattccgcggtttgcccagaatggtgcggcagcggcatcggtcatcagcgaagcactggttactgtctgctgtgtatgtttttccgtgaaacacattcaggtaagattaagaagaggatatttggcaaaaaccgtgattgcggtagcttttatgggggcacttacatggattgtcatgagcatggtaaatggagaatttctgcggcttgcagcaacagtagtgacaggggtggtctcatattttgctttatgcattatgcttcgcaatccagtttgcatggagtataagcagacattattaaggagagaaaaacaatgatctacgtattatgtccggcggatgtaaagaccggcggaacagaacttctgcatcagcttgtaaagaccctgacggatgtgaaagttcctgcaggaattgtttatactgagatatcagaagaacatcctggcatgaatcccgcttttctggaatatacggacggttatctgcgtgaggaagagatagaggatgaaaaaggaaatattttagttgtgccggagatttactgtgagagaacggcgagatatcagaatctttccgtgtatatctggtggctttctgtggataactatctgattcataacagttttgtggatagaaggcgtgcaaatggcacattgcgcgccataaaagccttgctcaccggaaaactgaaagataaaacggattttgtaaaaaaggcaaagatgcatctgtgtcagtcttactatgcgatccattatctggaaacgatcgggattagcgggaagcaggtacgttatctgtctgattatgtaaatgatatttaccttgccggggaagaagcggcacttcgcgaaaagaaagaagatgtagtcctttataatcccaaaaaaggggctgcattcacaaaggcgctccgtgagatggcacaggatctcaggtgggtaccgctgatcgggatgacgacggaagagatgcgttcctgcatgagtaaaagcaaggtttatatcgattttggaaatcatccggggaaagacagaataccaagggaggcggcaatttccggctgtatcgttatcactggaaagaggggtgccgcggcattcgcggaggatgtatgtattccggaaacatataaatttgatgagtcatgtgcgaaaaaagaagatattatatcatgcatcagggattgtatctgtaattttgatgtgcacaaggttgattttgacggttacagaagttatattagaaatgaacatcagcaatttactgcagatgtgaaaaaaatatttgtgaatgaggattacatatgataatatcagtaatttttgtgctgctctttcttgcatttttaatggggataatactggtaccgaaaattgatggaaagatcaatatgataaaagtggcagtgatgggaattatggctattttctgttatcagtcgttttgggcgttcatgtttcaactggtgggaataccggtgaatcttaaatccacatgtatttcaatggcggcagcggtgctcctgttatggggaatgatcattaaaaagaaaaaaatgcagcggatatttgtgaggataacagatattgctgtattagcagttcttgcaggaatcgtgattgcagtttcactacatatgtttactccatatttgcggctgagttatatcaattcagatccggcaaatcattttaatgatgcaatggtcattgtaaagcagggagtcttaggcaagcacatttatttttctgcatttgtcaatgcaatgtttattgagatattcagtccgatcctgatcgtttcaaaatattataaagcgtttatttttgcggatattttcatgcatgtgctggaagtgtggatgtgttatgtactgatgctcacggtcagtgagaaaaagatcgtgcggatttttgcaccggtgtttgcgctgggatatttctggggatatcctgcatacagttacatgacaggcggatttgtatactggagtattggtgttatgatactgatgcttttagtctatgccctgcttctgctggagcggtatccgaaaaattataagtgcaatgtgatcttactgctgtttgcattgtacgcaaatacatgttgtaatgcactgtttatcccgctcaattcagcggcggtgatcctggcattatttgtactcgcgatccggcaaaaaaagataaacaaaaaaatgatagcaggatttttggttgtcgtagtcattgcagcggcagcagtatttgtcttatttatggataaatggggcggctcttttgacaagatgataacttacgtcagcaaggcgggcggaatgtatcattccgtgtatgcagatctgatctatttcataccggcagcatttatcgtactgttttatctgctgaaaaaaaagaaatatccggcggcgatccctgtgatggcactttttatggtggtatgcacctgtgtgatgtacggatttctgataaatcacatgatgtcattttattattattttaagatctactataatctctggctgttcggctggctgctttgcgtgatggcagcagatatccttgcagatgaaaaacagcttgcaggattttatgcatatgttggatttattggaatacttgcgttatttacttttacaaattatgatatgaacatgtgggaatttgatcccggatataatgaggcatccgtaccgaaacattttctggcaatctattggaataatctagatacatcacagaaagactatggggaatacacgattttaccagatcttatggaagtgatgtcttatgcggcagaggaactcgatgatgataagatcccggcgctggtggctgatgacaggactttttactggtttgatggcatgcgggctcagaatacgagaaaatataagccgtataacagagaactgatggatattcttgtcaagatggataaaaatggcatcacgaagatttttgtggataaagaggataagatctatcagcagtatgaaaattatttttcactgtgtaaagcggtgtatgaaaatgaacgtgctgcgatcctgacattcccgggagaaagctggtgcaagatacttccatatgtaaatggttatgatgagggaaaattagaactgtataagtatgtgaagaaacatttaaagaatgaaagggtacctttgatggcagcaaaggaatcctgccttgattttatcatttaccggcagaaaaccaaacagaagtctacggattgttatacatggaattttaatccgaaagaaaatctcgataatttaaatcaacttggaatcaagtatattacagtattgtatggcgattcttattatcaggaaaatcagtattatttggatggacaggaaacagtatttgagaatgaatcaggcaagatcataaaatgtgcgggagacagtttcagcacagaatataaataatttgtgatatcagattttggaaatgttttgtttgagaaacaaggaggaagatccaaatgaaaaaaagacatcaggcagggaaaagaattgctgcatggcttatggcattaagtctttgcatgacagcggttccggcggagcaggtggtatatgcagccggtgggcagaatgaaacagaggtaacagaacttacggaactgacagaggttccggagtcggcggaggctatgaaagactctgaaacaacggaaaaaaccggagctggagaaaaagctgagacagaagaagccggaacagagagcaaagcagaagtgacagaaactactgaatcagaagaaacctctgaaataccggcagatacggagagcacagaaagttctgagataccggcagatacagagagtacagaaagttctgagataccggcagatacagagagtacagaaaattctgagatgccggcggatacggagagtacagaaattcctgagacgactgaaaatacagagagtacgcaggcaacagaagattcagagatgactgacgatacagaaagtacagaggcactcatcggggataccgaagcggcagacacggagaaagaagaaagtgaggatattctaaagaaagacggaaatgtgactccgggaagtacctatgcggcagcaacatcgattggactgaatacaacttataatgcaactacgtcgagtacatcacgtagacactggtataaatttacgatgagcaaagccggtatggtacagttgaaatttgcacatgcgaatttatcgggcacaaacaacagtgcagcctgggaaatcgattttattgcagatcagtatggcagcgcaatggtttctgtggacagcagtttttcagatacacagaatcagacagctaagataggactggaagccggtacctattatgtacagattaccggaaacataggatttactacagccgggtctgcagcttacagcttcagcgtacagtatgaagatacctattgtgaaacagaacaaaataatacgattgccacagcagataattatgacagattaggtcagacgattacaggaagcatttcctctgcatctgataccgattattataagatcacatccaccacaaaaggatatctttcatttcagttacagcacgataaagtgagcggcaggctttcaacagatatttacagcgtggcagtctgtgatgctgccggaaatacgatgtatacaatgacgagtaaaaaagacgaggagaaaaccgagtcggttaattttggacttgacgccggaacctattatctgaaagtatcaggaatcccatatctggatgcggcaggttctcttgcagttcagggagcaaacggagagacatataagctgaaggcattctggacgaatgcagacaactgggagagcgagagcaatgatgatataaatacagcagacacaatgacatcaggcaaggcagtttacggaagtctgtatggtgtcagtgattctgattattatggttttcagacaacaaaagacggatatatcgtgatcaatctgcagcattcgaaagttacaggacggcagaataaggctatttatgcagttacagtctgtgatacttccggcaattcgatctacgaaatgaccagtaaagcggaagatgaatccacggattccattaaactgggactgtcagcaggtaaatattatattaaggtggcaggtcagaatgcatattacggcggaaactatgtgatcaaaactacctttaaggcgtgcagtacctgggagcacgagagcaatgatacttacgatacagcaaatacggctgtttccggcacgacatacagcggagatatccgtacttacagcgatgtagattattttaaaacatcactttctgcaaatggttatatcaatgtgaaactgacgcatccggttgtgagcggacaggaaacaacaaacatgtttgtgctcagcgtgatccgtaaagtggacaaagaccagtatacagaagtctacactacgaagatccgtggcggggacacaagcatttccacgccgaaccttggattgccgaaaggtgagtattacattaagatcgcaggaaccggaaatacgacgggaacattattgagcggaacgagttatcctgtaaactatgatgtgtgtattaaagcaaagacagcaagtgaccgggaagtggagtcgaatgattctgctgccactgcaaataccgtaaagaacggaaaaacctattacggaagcacaagcagttcctcagacaaagattactataagatcaaaatgtcaaaagcaggctatctgcagattaagtttggacataaaaacaatcagagcacagcaagctgttataatgtcgttctttacaataaggataacagtgaaatatataaatttacaagcacaggaacagagacatcctttacctcatgtaaattaggactggctgcgggagaatattatgtatgcgtcagccaggcatctacactttatactggcgactatacgatctgcatgacacagaaagcggcttccggctgggagacagagaacaacggtgactgggcttcggcagataacataaaagtcggcaaagcggtaaacggtgtgatcacaggatatacgtcagatgaagactgctatcgctttacactcacaaaagcgcagtatatcaatttcagcctggcacatgagaagatcaatgattcgggaagaagctggtatgtgacattatataatgcaaatggcaagcggttttatcagaattatgatcatatctattgttatgccggcagtacttatacagagtcacctgctgtcaaattaagcaagggaacctattatctgaaagtacaggcatatgcgaaaaatgcagtggaaaaagagtacacactctgcgtcaataagattgagaacagaaaaacaagcgtaacatccgtaaaatcgacagcatacaataaactgaaagtttcatggaaagttgtaccggctgcaacttcttatcagatctaccgcagtacagcaaaggatggagattatcagaatatcaaaaccatcgacgatgtgggcaccagtttctggacagacagcagtgtaaaaaccggaaaaacatactattataagatcaagacggttgttaagacacagaatggagaacagaccagtggattttcgaatgtaaaatatgcaaaggcggttccggcaaagacgacgttaaaggcaaaagcgtcggatgcaaagaatgtaaaactgacctggtcaaaggtaaaaggtgcaagtggttatgaaatctaccgcagcaacagtaaagatggaaaatatagtaaagtaaagaccatatccaaaggtagtacgacatcttacaaaaacggtaaattgaaaaaatcgacaacctattattataagatccgtgcataccgcaaagtgaatgggaagaaagtatatggaaattattcttccgttgtttccgtaaagacaaaagcaaaataaaagtaaaaagagataccccggtgggatgatcatcatacatcctgccggggtatttttaagattttatgaaaattctggtaagatatattcaaaggttgggttttatgataaaataatatagattatgcaaaggtatgaatgtgaggtacttcatgaggaaaagggaaagatataaacatttgctgaatttatttgctaattttgtaatgcttgtggctgagacagcaatgtttgcatttatatggtataaaatgtatgtgccggaattggaggataagttctggaatagaggaaactgggcagtaatcggaatgtatgcattggtattgttcttttttatccgtacatttggcggataccggatcggataccttagaattacagatatttgtttgtcgcagatccttggaattttgtttgcaaatattatcgagtattttcagatttgtatgattgcaaatgattatatgtcagcatcaccgcttctgttattgacgacagctgagattgcagtgacactgcctaccgtttttgttgtaagatatttttatgtcagattatatccgccaagacgtatgatcgtaatatacggggaacattctccggaagaactgatttccaagattaattccagaaaagataagtacaatgtttgtgcaactgccagcgcctatatgggatatgaggcattgtattctaaaatattagagtatgaagcggtagttttatgtgatcttccggcaagtatccgtaataaaattttaaagttctgttatgatcagaataaaagaacctatattacaccgaagatatcggatattattttaaatggaacggaacgaatccatttgtttgatacacctcttatgttgtcaagaaatcagggacttacgatagagcagagatttgtaaagaggactatggatatcgtgtttgcactgctcgcgattgttatttcatcgccgtttttactggtcattgcagttgcaatcaaactgtatgatgggggaccggtattctataagcaggagcgtctgacgagagaccgcgagacgtttcagattatcaagtttcgcagcatgaaagtagattcggaaaaacagggagcacagcttgccaaaaaagatgatgacaggatcacaccggttggaaaaataattcgaagaacgcatttagacgagcttcctcagatttttaatattttaaagggagaaatgtcttttgttggtcctagaccggaaagacaggaaattgctgaaaaatatgaagaaattgttccggaatttcggttccgcctgaaagtaaaagccggattgacagggtatgcacaggtatatggaaaatataatacaacaccatatgataaattaaaactggatctgacttatatacagacatattcagcgtggttagatgtgaaattaatgcttatgacatttaagattatgtttcagaaagaaaacacagaaggtgtagatgaaaagcaaacgacagcgatcaaaaaggaatcatagagatggaacagacaagcgaagtacagatatctgttattatgccggtttataatgcacgggattatgtggagcagtgacggaaagtcgcgcaataaatacaagtcagctaaaatgcagtggaaagtttaccgttttataggaaagaaccggctaaatgcattgcgttatatggtacattacacattaaatagtgtcaaaaaatatacaagagggtaaggaaaatgaaaaaaaggattttagcagtaatcatggcagtctgcgtgagtatgacagcactgcctgcagatgtacgtgcagcagaagacagtgcagttcagacagaaagcacgcagaaaacatcaccgtcagagaaatcagcccagacagaaaacactgggaatgcagcagaagagctgactggaacggagatggcagagacagaagaagcagctgaaacggaagaaacagcagagacagaagaaacgaccgagacggtaacaatcgaaacagagacgattgagacagaagagccggcagagacagaaacttcggaaacagagaaaccggcagagacagaaacaatcgaaacagaaactacggaaacagagagcaccgagacggaaacagctgaaacggagacagaggagtcaaccgaaacggaaacaactgaaacagagacagaagagccgaccgaaacggagactgcggagacagagactgtccaggcagcagaacttaactacatgatggtagagtcaccgtacgttgagacaccgggaacgcagaatgtggtcttaagtcttggaacaggcgatgagcagctttcggatatcgtcttaaattataagaatctgaccaccggaaaagcatatcagacaaaagctgcaggaatagaagaggatatgatccggtttaccatggatttttcagaaaatggacaggcaggagagtatcagatcacttccgtgcagtttacacaggagaaaacaaaacaggaaatcctgctatcagaccttggcatggatgtaagatttggtgtcaatgaacaggcagagacgaacccggatcaggtactttatgatgaagatgcctatgcggatgtggatgctgatgttgttactatgagcgcagatggagaagttatttccgaaaacactgtggaaaatgtgctggagcagggaatctcagaggctgtcgccagtgttgcagataacttaaaaggtgcgaacagtaatgtgaaagtcgtactcgatccgggacatgatggcacccatgcaggagcatccggttttggagtacaggaagcggatctgacacttaagatcgccacatactgtaaagaagaattatctacctataatggtattactgtttatatgacaagagagagtgcaagctgtccggcaggcggcggagataatattgcatgtctggatgcccgtgcaaaccttgcaaagaatgtgggagcaaatgtgttagtaagtttccatttaaatactgcaaacggaacagcgagaggtgtggaagtttattatccgaacagcaactataatgcacaggtaggaggcaatggacaggcacttgcaaagaaaatatgcgataaattggcagcacttggattgaattatcgtggaactttgattagaaatgcatcttatgataaatatccggatggttctgcagcagattattacggtctgatccgtcgttgtaaaaataatggcattcctggtctgatcatcgagcatgcctttttggacaatgcaaatgattattatacatatttaagttctgatgaaaaattaaaggcactcggtgttgcggatgcaactgcaatcgctgagtatttcggactgacaaaaggagcaaagaccgtaacgctcaattacacgcagtcgagagaggatggtagtcttagattaaaatggacaggtctcgataatgtcgattattatgaaatttatcgtaatactgtgaatgatacaaactatcctaagattgacgaagtatcggatgctacatcttatattgatgataccgtaaaggcagggacaaaatattactatctggtccgtccggtatttaacgatggaactgcaggagagtattctaaacccatctcaggtgtggcattaggaaaaacaaacctcacaaagatcaaggcaaagagtggaaagaagattaccctgacctggaaaaaggtttctaaagcagagggatatctgatctatcgtcaggacagcagtgacagtaaattttatcagattggcacggtaaaatccggcagtacactcacttacacagatactgtaaaatccaataacaaaacatatacctacaaagtacaggcttacaatacaaacaatggcagacagggtgtcggtgcatattcttccacaaaatctgcaaagacacttgcaaaagcaaaaattacaggaatcacatcctcggatgaggaagtattaaaaattttctggaaaaaggtaagtggggcaaagggatatatcatctcccgcagcacaaagaaagatagtggttatagtgaaatagatacagtatcaggagaaaagacaacatcctacacagatgatactgtaaaagcaggaaagacctattactataaggtcgaagcatataatgtcaacagcggtacaaaaggatacggcggtgcatcagacgcggtggcaggaaaaactgcaaaacgtacaaagatcacttcgatcgtttccacaaatgaaaagaccttgacgatcaagtggaataagatcacaggagcttatggttatcgcatcaaacgaagtaccgatgaagatggtacttacaaagttgttaagacgattaaatccggaaacacgaccagctacaaagacaccagtgtaaaagcaggaaagacctattattacacagttgaaacgatggtaaagacaggagacaatatctgctacagtggtgattcagcatccgtggaaggaagaactgcgaaaaaagcgaagatcaagtatgctgtttcaaatggaagcaatcagattgaagtaaactggggagcagtgagcggtgcctatggctaccgtatcaaacgcagtacgtcaaagaatggtacttataatgtgattgcgaccgtaaatggaaagaataaaacaacctatcaggataaaaatgtaaaaactgcaaagacctattattataaggtagagacgatcaacaaggtaaatggtaaaaaaggatacagcggtgattcggcagttgtgtcagcaaagacattaaaaactacatccattacagcagtcaaggcaaccggaagtacttccgtaagactggaatggaaagctgtggatggggcatccggttatcagatttaccggagtacgtcaaaagacagtggttataaaaaggtcggacaggtcaaaggtaaaaatacgaaaaaatatgaggataaaacattagaagccggaaaaacttactattatcaggttcgtgcatataagagcaacagtgctaaaaacggtgtggcatctttctcaaaagcacagaaggcatggacgatcaaacaggtggtattctcccagatcacaagtgacagcaaaaatcaggtcacacttggctggaagaaagtttcaaaagcacaggggtatgatatttaccggagcgacgagtcaaacagtggatttgaaaagatcgcttcaatttcatccggatctacactgacttacacggataagggcataaagagcggcaatacgtattactataaaattgcagcaacttataagatcaaaggcagtgcaggcagaggaagttatagtaaggtaacagaggttgcagtcttaaaacagggaagtatttcttctatcacactcggagataataatgtattaaatatctcatggaacagtgttgcaaatgcaagtggctatgaacttgccggtgcggtcagcgaaaaaggaacttataccacattacagacttctggtgcaacatcctttacacacagtaatctggtacagggaacgacatattactataaagtaagggcatacaaagatttaagcaacggaatccgtatgtacggaccatggtcagcggtaaaagcaaaagctgcagcgcatgagatcatgggtacaagcagtgtgacagtcgatcagatggtatcttactataataaacgttataccttcccggcagagacttaccgtgataagggagcagattctgcggaggcattctttaagatcttaaaagaagaggcagaagccgagggtgtaagagcagatgtattgtttgcacaggttatgttagagaccggaggattaaaattcggcggtgatgtgcagccgagtcagtgtaacttcggaggactcggtgcagtcggtggcggtgcagcaggtgagacttttgcagatgtaagaaccggactccgtgcgcaggtacagcacttaaaagcatacgcaagtacagatggattaaacaatgcatgtgtggataagcgtttccaggatgtatcgcgtggaacagccagatacgtggagtggcttgcgattccgcagaatccatatggaaaaggctgggcagcagatgcggattatggtacgaagctgcttcggatcatggatagtttataaacgaaaaagtatggtgatataaatgatagaacagaattattccgttttaatgtctgtatatagaaaagaaaaagctgagtatttgcaaaaaagcattgacagcatgctctcccagacagtaccaccgcaggatttcgtgattgtatgtgatggattgctgggggatgaattaaatcaggtactccaaaaaaaaaagcaggagtatccggaatgttttcagatagttcaactgcctgaaaaccgaggactgggagaagcactcaaagaaggactggtttattgtaaaaatgaactggttgcacgaatggacagcgatgatatcagtgttccagagcgttgtgaatggcagttaaaagcttttgcccaaaataatgtatcgattatcagtggagctgtgcaggaatttatggatgatacagcacaggcaggtactgtcagatatgttccggaatcatcagaaaagatagcggtatatgcaaaaaaaaggaatccttttaatcatccggcagtgatgtttaaaaaaagtgatgttataaaagcaggaagttatatggactgtcatggttttgaggattattatctatggctccgtatgctctcaggcgggatgaagggatataatctatctgaagtgctagtgtacatgagagtcggtaatggcatgtatgcgaggcgcggaggagtttcatacttgaaagatatggcagagtttcggaaaatcatgttaaatagcggatacattaatttactggaatttctgacatctgtcatagcccgtggaattgtaatcctgatgcctgcgaatctgagaaaaacagtatattcggtctttctcagaaagtaatccttggcttaaagacagagatttcgcttttaaaaatataatccctggttttgcctgtgaatttcaggaaaaacaggggatatccattttcaatataaaatcccacaaaaaatcaagtgtttaacggacaaaagaaaaagaaaatctattccattgttcaacattgtcatgccggtactgctttttctgatgctgcagtatgagagcttccataccattttttcagaccctgaaagcatgtcaaaaagactgaaaaactgtatcagtggaaggattccaaaagttgatgcagtccgcgaccttctctccagaataaacccggatgaaatacgcagcatacatgaagaaatgattgatatcataaaacgtaaccggatattccggaatggaacgataagcggtcagcttaaggcagagttgacgatatgccggacgttttgtccggaaccatagcctgacgccttcttttgcatacgatagtatgccagagatacctttagctaaccggtaatagcagaaatatacttttttctttacagggtctgctttttgtataattgaaaccttaagggcatttgtttctgacttcatagatatatgtgcaagaaaagccatgcataaggtgatataaaaatttaacgtattgatggcagacagctttcgtactcgaaagttttcaaactgaaacatctgttttttgcagcggaaatattcctctattttccatctcgaaaagtactgctttgcaacagcgattacatcttcttttgatttaatatctttattggttgcaagcatcattggatgttcggttaaaccatagacgagcaccaggtcaatatcttttttagaagcggttatctgaacttttacatgagacagatatgcttcacgggatgattgttgccggtaagaacacaggcttctgttacgtgatagcctttttcataaacggttttagtattagtgcttttagaaccatcacgaacaagtccaagtgcctcgaacctgcggccttccggttttatcacatcactatcatcgatatggataatgggattgctggaaaccattgtacgaacaaaggtcagatatgacttttgagcatctttcggaattcctttgttgagatgtcttgtaagacgctccacagaattaacttttttagaattctcatgaagctggtcaacaatgtttgtcagaaggcagctctgagaggcaagcatgccgtaggtcatatcagcagtaatctttctatctggtttggaaagatgttttgaaatttttttggaaaaagttaaaatttccagtttcaaagtataagtatttgttgtagaattaagcataaggagtcctcctgtttttttgtttagtattattttgatttggtaccttaattttactacaaaacaggaaaggattccttatattttgggcattttttgaaagttgtttatgacgatgattatgaaaacggggctttgtggataaaagtacggaaactcaagagagagtagaataaattgacgtgaaatagcttgtatgatataattgtgcagtcttttggaatacatggaatagataaaaaggagttagaaaatgaattggagaatcaatgagagtggtgtatcagcgacaattgaaaatattgaatgggaaagaatacacttgattcttacagtaaggctgcatattgacgggcagaaaacgtatgatatagataagatggaattttatgcggtaaataattttgggggatgtggagttaagttcgatgtacgcaggaaagaagatatcatcaaacttcatgttaatgtaacaaataatggtgacctacgttgtattccgaggggaacatatcgtatttttgtatgtgaaaaagattgtgttctggcagagtgtgaaaccagtcctgatattgcagatcaattagaagcaatgtccagaaactttttgtacggtgaaaggggaaaatcttacaatgttacattttatatagaagatggaacggatacactgccattccgtatgcattgtatcgcattaggggcagtaggggttacatttccacagaatccaagcttcctcaaaaaaataaatttgataaaagcattgaaagactgctatttatctagcagatctgttttaagaagagtatataaatggtattcatttttgtataaaagcagacgaaaaaatacagtcctttttatgacagaacagaatcagaaaattgcatcaaatttaaaagcagtttcagacagaatggttgacagacagctggatcagcaatatcggttattgtattctgcacgtcctgcagcggcggagccgcaaagtaaaaaaagctggattggtcttatgaaattactggcacagagcggcactatttttattgacgatcatgcaccggtactggattggctaaaactggatgatgatacaacgctgattcaattatggcatgcaggagcagggtttaaatcatcaggctacagtcgctggggacatgaaggatgtccttcaccgcagtcctgtcacagacaatataagtacggaattgctggctcaaaaaatatcgcaccgtttttttcggaagtatggggaattaatgatgagcaagtattgccaacaggaatgccccgtatggatgagtatttggatgagcagcataggaatgaaaaaataaaagaattgtatgagcagtttccaatgtgcagaggtaaaaaagtcatactttttgcacctacctaccgtggaagaaataaaaaaacagcatattatccgtatgaattgatcgattttgaaaagttatatcagatctgtggagatgaatatgtagttttatttaaaatgcatccatgggtaaataaagatattgtgattgaaaaaaaatatgcggataaattcttggatgtaaaaaaatacccgaatattaatgatctgttctatattgttgatttatt

SEQ ID NO: 5153 - DNA, 13262 bp, Unknown
  gut microbiota DNA sequence
atatgaaaatagaaaaatttggaagatactatattatacaagcaatcttgattatatttgaggttgtgatcaatctgatcatttttgcagttccgctcgcggtaaatcagatcatcaatggaaaacttgcactgacggatcgtgtgatagcatttatcatagggtttatgctgcttgagatttgtatccagtttgtctatctattgatcgagctgcacatgcaaaaagagtacaagaaaaatttgtcgaaggaaatttaccagaaaatctattccatgaaatacgcatcaatcataaagtacggtgcaacgtacctgacggagcgggcagactcgacggtgctcacattggcgaatctgtatattatgtcggtcccgatactgactgcaaaatcactggttattttgttgattctgttatactccctgaccatcaatatttttatttttctggtgatgctgtttatcttgatactcaatgtggctggattttatatcctgaataaaaatttactgaaaaaatcagccgagatgcagcggattattccaaaggagcgaaaagacatttatcagatcgccaatcaggtagattttatcaagcagaatgaagacaatacaaatctgaatgacatacttgaaaaacatttagaaattatcgaacaggaaaataaaagggtaaatgtttatgcgcgtgggatgagtgaagtcatcgatttttttaacatgttcgcccaaaacattattttgatcgtggtattttatatgtatctgcaggggaatacaaaattaaacagcatttttacaatttcgattctcatgtcgtatcttttacctgccatctcaaatattgtgaaggtaaacctgaatttaagagaggtaaaggcaagccgggaatttttacagcttgtggaggatgagcaggaacagagtggagatataaagatagatcatattgatgatgtcgcggtcgatatggaaaaacttcagacgatggacgggatcttactggcaaaagatattcatatccaggcaaaaaagggagatatcattggaatcgtgggggagtccggttgtggaaaaacgacactgatgaaaagtattttaaaattctgggatcagaataccggaattaagatcaatggaatcccgctggagaatattgaaaaccattcccttcggaaacaaatgtcattttattcgcagaatgtgccaatcataacaggttcattttatgataacttaaactttgggcgcaggaaaatggaaccggaggtataccagaacattcgttttttagataaatttacaaaagaacgtgatatctttacaccttttattctggaaaatggcaacaatctgtccggcggtgataaacaaagaatcgcactggctagaatgtataccgaggaggcagaggttctgattttagacgaaccgacaagttcactggatgaaacgaccgaaaaggatattttagatgggatcagccactgcccggataagattatctttctgatcacacatcgaaaagagaatttgaggtactgtaataaaatttaccagatccgtgacaaaagaatggtaagcgtgaaaaacgttgatgagttatcaaaataagtcagaacaaaaaaacagggtggcagcaccctgtttttttaccatccaccgcctaaaaccgaccacctgccgcaaatcagtagaaaccgttccagacattgcctataatgacatcagaaaggaggaagtgagaaaatgcaaatagaaataaaactcgacgaatcctgcaaagaacccaagatcatcatccatacagacaagatgaccgaagaagtatcgcagatcgtaaagttgctgtcggaggaaaaaccggaagtctttgcggcgattcacgagaatggcgaaatcattttgttagaacagacggaaataatacggatctatgcagaaaatgacagggtatatgcaaagacaaaagacggcagctaccggttaaaggcaagactgtatgagttagaggagagactgaacaaaaaaatgtttatccgcatctccaattcggagatcattaacctgaaagaagtaaaaaaatttgacttaagtttttccgggacgatctgtgtttcgatgtcagacaaaacagcaacgtatgtttcaaggcgttacgtcagaaaaatcaaacaggtattgggattatagaaatggtggtgtgtgtgaaaaatatatttttcatacacaggaatggaggttatcatgaaaaaaagaattttatgcagagcgcttataggtgcgccgatcggtctggcaatcagtactgcaatcacaattttttcttcactcatatacggtgacggaaattattatccggttgtcccggcattggtggagcagtgtggaaatgaaattaatgcggtcgtggcgcagatgatcgcatctttgctgtacggtgcagtctgggcaggcgcgtccgtgatatgggagatggatgactggagcctgctgcggcagacagtgactcatctgctggcaggttcgattgcaacatttccggttgcatatctgatgtattggatgaaacatagcattgcaggggtcgttgtgtattttgcgatatttatcggaatctatgttggaatctggatcacattatacagcagggcaaagagagaggtcacaaagctgaatgaaaaagtaagtttacaaaaccggtaagagatctgttttttattgcaaaacaccgctccatttgcaggtatttttctaaaaaaagaaatgatacattgaagaaaatgagaaacttgcaggagggggactgctgtatggaacacaggttcttacagcagcaaggcagaaaatggagaaaaatataaaatttgaacagaacacaccgctgtgggataacagtctttcgatagaagaacgtcttgactatctgacaggggcaatgacgcttgaagaaaaaatacactgtctgacaaccggatgccctgacattccgaggcttggaatccgggcaacttatatgggcggtgaggctgcacacgggattgaggcgagacatgaccaggcatttaataaaggggagccggagccgaccacagctttcactcagccgatcggtatgagtgcgagttttgacagggagctgatcagagaatgtggtcgcgctgtcggcgaggaagccagggctttgtatacaagaaatggtggaggcgggctctgccgctgggcgccaacgattgatatggagcgcgatccgagatggggaaggacggaagagtcatacggcgaagatccgtatctgaccggagagatggcgggcgcatatatccgcggtatgaggggcgaggatcctttttatatccgttgcggggcaacgctgaaacatttttacgcaaacaatgtggagaaagaccgcattaagatttcatcttccgtagacaggagaaataaaaacgaatattatttaaaaccgttcaaaaaggcgatcatggagggcggcgcggaggcagtcatgacctcctacaatgagatcaacgggattccggcgatcgtcaatgacgaggtgcgccatgtcctaaaaggcacctatggactgcccgggcatgttgtttgtgacggaggcgatttttcacagacggtgaacgaccatcatttttatcagacgcacggggaaacactggcaaatggattaaaggctggtgttgactgtttcacggatgatggagagattgtttatgctgcggcaagggaggcattagataacggctggatcacggaaaaagatattgatgaatcggtgcgcaattcgttccggacaaggataaggcttggcatgtttgataaagagggcgactgcccgtatcagaacatgggcgaagaatatatcaacaatgaggaacacaaacaacttgcgcgcaaaatggcagatgaagcggttgttcttctgaaaaatgaaaacggcatacttcctctggatgaaaaagcagaaaaaaagatagcagtggttggtccactcgcagatgtttggtacaaggactggtactgtggtattccaccgtatgcggtgacggttttggatggaatccgggaagtatttcctaatgcagaaatcagtcatgaaacaggactttctgagattcaaatttatctgacagatcaaaatggtgaaaaatgttatgtgggactggatcaaaacagccgattaaaactggtaaaaaaagaacaggcagaaacctttattttcaatgactggggatgcggcagcatgacactggtggcaaaaagcaatggcatgtttgtcactttagaggagaatacagatatcattaaggcagataaaaaagaagcctttggatggtttgtccgtgaatcgtggaattttaagaaagaaaaaaacggttttacactggaaagctggaataaaaagcaggtctttgtggataaagcaggttatttttccatttgcgtggataatcctgctgcagaatttgaaatagaaatcgtaaaagatggaaagaaagctgctgaaaaaacagcagagaaagctgattatgtggttgcagtcattggctgtgatccggttatcaacagcaaagaagaggtagaccgcaccacactcggacttccaccggagcaggaagaactggtaaaagaggttgcagcggcaaatcataacaccatcgtggtcttgattagtaattatccgtatgcaattggcgaactgcagaaacaggttccggcaatcctgttgtcagcatcgggcagtcaggaacttggacacggaattgcagatgtaatgactggaaaagcatcggcagcaggaagagtaaatatgacatggtatcattcagatgaagacctgccggatatgaatgactatgatatcatccagggaaaacgcacttaccagtattttgacagagaggcgctctatccgtttggatatggtttgtcctatacgacgttttcctacgaaaaaatgcagatcaaaaaagaacggggctgcgtcaaagtaagctgctttatcaggaataccggagaaaaaaccggggatgaagtcgtacagctttatgtgcataaaaaggattcccgtgtaaaacgaccgatcaaacagctggctggatttgagcgtgtccataatataaaaccgaaagaagtcagaaaagttaactttacagtacagttgtgggagttagagtattatgatgtgatctcagagcgtatgatcttagaggacggaaactatcagtttatggttggcgcatcttcacaggacatccgtttagagcagagcattatgattgatggattacatgccggaaaaagaaatccattccagacgactgctgctgattgttatgatgcgtatgaccacatgttcctgcatcggggaatcaacggttcctcctgtgtgattccgggttctgccggggatgatccggatatgatcggggaatgtccggtagagggaacgttgatttatcatgattttgtcttttataaaaaaccgcgcaagttaaatatcacgttaaaggtactcgaaacagctcatatcactgtgacgggtgagaacggagtgcaaattactgcagaaccggtagactgctaccggatgttagaaatagacctgccggaagattttatagatccaggagtgcctgaaacgattcagatccaggtggaaggaaaatgtaagatatctaaatttgtgtttgcctgataaaaaattcacaattgaaccgcaggcggtgaagtgttatagtatgttctggatgatattccgtatacaaggaaatcataccagaacatattttttatcagaaaaagagaataaaacaaggaaaaccgcttgtatccgtcagttgacggaatgagacagtcgcatgctgctccaccggaggagaaaattcatgctcgtaaaagagtctgtattttgttccaaaaaaaaggggaggatcgcatgcagatcagttttattggcgccgggaaggtcggcgtgtcactcggaaaatattttatcagtaagggcaggaaagtaggaggttattatagtctgagcccaaagtctgccgcatgggcggcaaattttacaaacacaaagcaatatcaaagtatcgaagaaatcattagcagcagcgacatgatcttttttaccgtgcccgatgataagatcggggaagtatgggaggcggcaaaaccgtatgccaacggtaaaatcattgcacactgcagtgggattcacagttcaaacatcttttctgatatagatcgtactggtagtatggcctattctattcatccactctgtgccgtcagtgacagggaaacatcctggcaggcacttggtgacgtactgttcaccattgagggggatgagcgaaatatctccaatatccagaacatgtttgcgcagatgggaaaccggacgtgttttatttctgcggaaaacaaaatcaaatatcatgcagcggcatctctggcatcgaaccacatgacagcggtattttttatggcgcaaaaactattcttacagtgtggtttttcaatgcagcaggcaaacgaggaattgtaccggcttgcaaaaggcaatctggaaaatatccacgcgcagggatgtgcaggttccctgaccggacctgtggagcgcggggacaaaaataccgtacagaaacatatggatgcattagatgctgacatgaaaaatgcctatctggaaaatgcaaagcagcttttagagatcgcagagcagaaaaatccggacagagattatgcggcaatgagagaaattttcatgccgacagagattggagaatgacaatgaaaaacacagtagtaactttgcagaagcaaaaagacgagcacgacaaaattacaatggtgacggcttacgattacacgaccgcaaagatcatggatgaatccggcgtgaatacgatcttagtcggggattcacttggcatggtcatgcttggctatgaggatacgttatccgtgaccatggaagatatgatccatcacacggcagcagtgaccagaggtgcaaaaaatgcatttgttgttgcagatatgccgtttatgtcctatcagacttccgtctatgatgcagtggtaaacgctgggcgtctgatgaaagagggcagggcaaacgcagtcaaattagagggcggcgtggaatttgccccacatatcaaggcaatcgcacaggcatcaatcccggttgttgcacatcttggactgacgccgcagtcggtcaatgcgtttggcggatttaaagtgcagggaaaagacattgaggcggcacagaagctgatcgaggatgcaaaagcagtcgaggaggcaggcgcatgcatggtcgtattagaatgtgtaccggcaaaactggcaaagaaaatcacggaaatgctgaaagttccgaccatcggtatcggtgcaggcgcagactgtgacggacaggtgcttgtttatcaggatctgcttgccatgtacggggattttcgtccaaaattcgtaaaagtatttgcaaatgtcggcgatgcaatgcgtgagggaatggcggcatacatcaaagaaaccaaagagggaaccttcccttctgcagagcattgttttaaaatagacgattccgtgatcgaaaaattatattaggaggaacatacacatgaaaatcgtatcaaccataaatgaagtgagagaacaggtaaaagaatggaaaaaagaagggaatacgatcgggtttgttccgaccatgggatatttgcatgaaggtcatgcgagccttatcgatgcagcacgtaaaaataacggcaaagtagtggtcagtatttttgtcaatccgatccagttcgggccaaacgaagatttagacagctatccgagagatttagagcacgatgcaaaactctgtgaggaacacggcgtggatctgatcttccatccgacaccggaagaaatgtatggggataacttttacacctttgtggatatggatgtgctcacaaaagaactttgtggattaagcaggccggttcacttccgcggcgtttgtacggtcgtatccaaactgtttaacattgtgactccggacaatgcatacttcggacagaaggatgcacagcagttagcaatcatcaaacgcatggtaaaagacttaaatatgccactttccatccacggctgcccgatcatccgtgaggaggatggacttgcaaagagctccagaaatacatatctttccccggaggagagaaaagcagcactcgtgctgagccgctctgttttccttggtgaaaaaatggtgaaagagggagaacgcgactgtaaaaaagtcatcgctgcaatgactgaagaaatcgagaaagagccgcttgcgaagattgattatgtcaaaatcgtagacttatccacaatgcagcagatcgataccatagagcacggcatacttgcagcaatggcagtatacatcggaaaaaccagactgattgacaactttatgatcgaggactagaaaagaggaaaaaatgactatttcaatgttaaaaggaaaaatccaccgcgcgaccgtaacgcaggcggagcttgactatgtgggaagcattaccgtagacatccagcttttagaggatgccggcatttttgagtatgagaaagtgcagatcgtggatgtgaataatggcgcacgttttgagacttatacgatcgcaggagagcgcggcagtggagtcatctgtttaaacggtgcggcagcccgcatggtacagaccaacgacaaagtaatcatcatggcatatgcagatgtgacaccggaggaagcaaaacagcagaaaccggtcgttgtgtttgtggatgaaaacaaccacaccacggagatcacaaactatgaacgtcacggggagatatcggcgatccgttaaaaaaatttactgtttgaacaaatatgaaggctgtatttaaaaaggttaaagatacctgaaattccagaaacagatgaccgggagtaaacggtaacagttgaatcataaaaagcaatcagttataattatttataattgattgcttttttaatcatggaaacatatttttgtagaacagaatttatttttgcaaaaagatttttaattacatggaggaaaatatgccgcagaactgttatgaactcgtatggatatttatcatttatgcctttatcggctggtgtacggaggtttcttacgctgcattagaccgtggaattttcgtaaaccgtggatttttaaacgggccgtactgtccgatctatggttgtggtgttgtgatcgtcgttgcggtgctcactccattgaaagacaatctgctgatattgtttatcgggtcttttttgctgacctccattctggaatatattactggatatttactggaaaaagtatttcataaccagtggtgggattattctgacaaaccgtttaatattcacggttatgtctgtctgaaattttcgatttactggggactggcatgtactttcatcatggatgtgctgcacccgatcatttataaaggaatcacactgatgccgcatattgtcggaatgattttaatttgcattatcatgaccgtattttttgtggactgtggaattaccgtagcaacgatcctgaaattcaataaacggctcaaagtcatggatgagatggcagaacgcatccacaaactttccgatgagatcggagaaaacatttatgaaaacgtgacggacatcgtggaaaaatcagaagagttccaggaaacacatgccgagctgttagataaattagcggagacaaccggggctgcgaaggataagattgccgaaacaaccggaactgctaaaaataaaattaccggcacaacagaaacagccagagaaaaaatcgtcgaaacgaccggaactgcaaaagagaagatcacagataccgctgcaaatgcaaaacttgcaatttcagaaaatatcatggaagcaaagagcagtttcgaggcaaagaaaaatgcctggactgaaaaatcggaagagtggaagaaaaaccgcgaaaaacaaaaagcggagctttctgaactctctgagaaatacgaacatctttttgaagaaaaaaactttggctttcagcgtttgatgaaagcattcccggatatgaagtcaagagaaaatgataagactttgacggaatttaaaaaacactttcgtttagacaagccggaacaaaaataaaacagatgcgcagcgggcagcagtggacgcagaaatggagaaaacatgatcagaacagtcgatacaaaaataattacagaaaatgtcaaagagatgtgcattgaagcaaaccattatctttccaaagatatggatattgcaatgaaaaatgcggttacaacggaaaaatccgaacttggcaggaaaatattaaatcagcttcaggataacttaaagattgcggatgaagagatgataccgatctgccaggataccggaatggcagttatctttttggaagtggggcaggatgttcattttgagggagaggcgattgaggatgccatcaacgagggcgtgcgtcagggttacacggaaggctatttgcggaaatccgttgtgaaagatcctctgatccgtgaaaatacgaaggacaataccccggcggttatccattattccattgttccaggggataaagtaaagatcaccattgcaccaaaaggatttggaagtgagaacatgagccgtgtattcatgctaaaaccggcggatggtatcgagggagtaaaagatgctgtattgacagccgtaaaagatgcggggccgaatgcatgtccgcctatggttgtgggagtcgggatcggtggaacatttgaaaaatgtgcaatccttgccaaaaaggcgctgacacgaccggtcggggaacattccgatattccttatgtcaaagacatggaagaagaactgttaggaaaaatcaaccggcttggtattggaccgggaggatttggcggtacgacaacagcacttgccgtcaatatcaatacctatccgacccatatcgcgggacttcctgtggcagtcaacatctgttgtcatgtaaaccgtcatgtggtaaggaaagtttaaaggaggatagtgtgaaaaataagatttttcacactgcaaatgaaaacgttgttttcattgaaaagcagcgcaagaatggaggatatcatggataagcatattacgacgccgatcacggaagaagtgacgaaagatttaaaatcaggtgattacgtttatattacaggaacaatctatgtggcaagagatgccgcacacaaaagaatgatcgaggcactgcagcggggagaagaactgccgatcgatatcaaggacagtaccatttattatatgggtccatctccggcgcgcgagggcagaccgatcggttctgcaggaccgaccacagccacccgcatggacagatatgcaccgacactgcttgatctcggggaaaaggcgatgattggaaaaggaaaacgttcaaaggaagtcattgatgccattgtgcgcaaccatgcagtttactttgcagcagtcggcggtgcaggggcacttttatcaaaatgtattacaaaatcagagatcgtatgttatgaggatcttggggcagaggcaatccgtaagatcgaaatcaaggattttccggtgatcgttgtgatcgatagtcagggggataatctctatgagacggcagtcaaggagtttgcaggttagtattttatttgcatatttcctgtttttgctggcaggagtatcttttgataacatgcagaagataaaaaatggtacatgtatcgtgtctgcctgttatgatgaaaagcagatgagggaggaatgggaacaaaaacttatctgggataaagaggattttccgggactgccgcaggagggagatacggttggaatcagctattatttttatgatgaaaaggggaggcttgattctgttaaaagttatggaaaattagatgatgcgtatggaaacgataaagaattaattgctgaggatgagattttttaccggtatgatcaggcggatgcgcaggtatttaggcagtggtacatgtatgtcccgattgcgtattgggaaaaagaaaaatattcatcgaggtgtgtgaataaatatctgacgtatgattatctggacgaaaaagaaatggaacagatgtttgatgatttaaaactgccatcagataaatactttgaaacctgtgccagagaagggaaaatggtttctgtcatgaggaaaaatgacaaaaacggggattctgaaacagaatattattgtcctgtcagaaccggcggccagaacagacaggatgcagcagtgtatcaactggatggcagttaccttattcaggacatgcggcaatatgaagagggtcagagactgcggactgaaatgaatcatgatggagttttttatttttatgattatgatcggaatggaaacagggtcatgtcattgtgccgtacttcagagggagaatgttatatccagaaaaaaatatataatgaaaaacagcagatcactgcccaatatacgcaatccatatcaggtgcagaacaaaaagaactgtcattaacggatgggagtacttttattttgaaatggaacaatgataacttcgtgcaggcagtatggaaaaaatctgacggaacaagggatatatatcagtgggagcagcagggcgatgaaaaaaatataatccagacgctctcagacggcagggtgatcgactggaaatcatctgcagaaccgtggtatgaagatgcattatccggaggatggcaaaacaaatacaactggtacattgtaaaagaaggagacagtttgtggagtattgcagaacgggaattgggcgctggtgcacgttatgaggaattgtacagaaagaaccggtgtgtcattggagaaaattatgatcagttatatccgggaatgagattaaaaatcgaaaaagagagagaatagacaaagggtgcaatgcatttttcggaatggaggactttatggaaaaaaatttaaactgggcggttttaggaaccggtgtgattgcaaatgagatggcgcaggcattaaaagctatgggaaaaacactttatgctgtgggtaaccgtactcatgaaaaggcagtcacatttgcagaaaaatatcaggtcacaaaggtatatgatgactttcatgagatgtttacagatctacaggtagatgtgatctatatcac

SEQ ID NO: 5154 - DNA, 40350 bp, Unknown
  gut microbiota DNA sequence
tacttgattttctaattgcatacgcaattcgtgaaatgtatcattatactgttgatacatcagacacacaaatgtaaatagggacaaaaatatagaaaaaaaagagaattttgcagaaataaggaaaatataaagagaatctttcgaaaatctttatttttttgtgagggtgttctttgtattcggaaggtatgataatactcaaaggagggtaagagcaggaagatatcagttgtgccgggaataacgcaggatttgtttcattttgttatggtaaatgatatactgataggaagtgtggaaaaaaggaacatctgcagcacagaaagaaaaggggagaagtgtgaaaatctttcacacagacaaaaataatggaacagtacaatattttaatcgttgaagatgacaaagagatccgtgatggaatcgagatatttttaaaaagccagaattataacgtttataaggcggcagatggtatagaaggtttagagattattgagagtaaggagatacatcttgcgatcgttgatatcatgatgccgcgtatggatggggtaacaatgacattaaaactcagggaacatcatgattttcctgtaattatgctttcggcgaaatcagaggagacagataaagtgatcgggctgaacatcggagcggacgattatgtgacaaaaccatttacgccgttagaattgatggcgcgcgtcaattcccagatccggcgttatacaaagtttaacaacaaaagtcaggagaaaaaggaaaatgacagggtacatatcattggcggaattgagctgaatgaagatacggtagaagtatttgtggatggaaaaccggtaaaaatgacaccgattgagtttaaaatcttagcacttctgatgaaaaatccgggaagagtttattcggcggacgagatttacgagcgtgtctggaatgaaaaagcgatcaatacggatacgattatggtgcatgtgagaaatatcagggataagatcgagatcaatccgagagaaccaaaatatttaaaggtggtgtggggcgttggatataaaatggaaaaacagccgtaaggcggggattgtgataacagcagggtttcttcttgttttagcagttatcaattttttatgctatccgggaatcaatcgcagaagcaaagactggatgcaaaagacagaagcagcaaaaacaggtgcagacagtgatacgcagattcggacacagtttctgaaaaatctgtatgagggattttatctgctcgatctggaatatcagaatcagaagagtgagacggagatgtcagcaacagatctttatatcgcatcttatgcaaaagcggatgaaaccgacaggtgggagtcacaggaacaattagagcaggtaaccaatgatgaagtattgtcggtgatggatgaatggagcagtcagtttgaaaaaatccgttcccagattgattattgcgtcatggaatccgaagatggaagtaaactgaaaaatacaacgcagaatttagagagcgtactcggtggagaggaaaaggatgtcagtgaacaactggcacaatattacagcgaattgtttgcggtaaaatttaatgaagtcggggcgatggaagtaattcctctgctgtcagacagggaaaatagcggcgatcttttagtaaaatccttaggggcacaggaacgcagtgaactgttaaaaactaatctggaagagtattttaatccaacagacatgcccgtgctcaaaggaccggaaaatatagagtttgtgatcggtatttccaaagagaaagcatctgaaaatattctttatgattctggcagtgatgaggaagaagattattttgaaaagctgtccgcctataaaattaatggggcacttccattgtatggcgcatctgttgtagcggtgatcgcatttatgttttttatgacagggaaaaaagccggaggcaatatcttaaatgatggaaaggtacatgcttacgcggcagaacttggagtcacaggtgtgatctgcggactgtgtctgcagaattactttatggaacttatctggtcatatggatttgattcattttcggatgcggcagatgaactgatgggtggacaggtttatgatgttgtgatcagcgtacttactgcagttggaactttgtggctgatctatgcaatgtggtttgcagccgcatatctgctgagaccggtattttcagtcggactatgggaatatgttaaaagatacagtctggtctatcagatcttcccatggataaaaaaacagtttaaaaagacaggcaaccggatcagacagtggtggaacacactctccggggagatcacacacattgatttcagtgaggaaacgacaaaactgatcttaaaagttgtcgttataaactttgcagtgcttgcagcctgttccttgttctggttctttgggatcggtgcattagttgtctattcgatcgtcctgttttttattataaagaaacattatgagcagatcaataaagattatcatgcgatgttagatgccatgcagacgatcgcagaaggtaatcttgatcaggagattcagggggattttggcatatttaatccgttccgggacgaacttgcgcagatccagaccggtatgaaaaaagcagtggaggaagaggtaaagagccagcgtatgaaaacagaactgatcacaaatgtttcacatgacttaaaaacaccgctcactgccatcacgacatacattgaactgctgaaaaaagaagacatcacggaggaagaaaggcgttcttacattgatactttagagcgtaaatcactgcgccttaaggtgctgatcgaagatctttttgaagtcagcaaggcaaacagcaataatatcgtacttaataagatggaacttgacgttgtaaacctgatcaaacaggtcagcattgaacatgtggataagatgaaagagcggggactcgaacttaagtggaatgtgccggaagaaaaggtactgttaatgcttgataaccagaaaacctaccgcatttttgaaaatctctttgtcaatgtggtcaaatatgcaatgcagggcagcagggtttatttagaggtgcgaaagaaagcatcccttgtagagatcatcttaaaaaatatgtctgctgaggaaatacatatcagcggtgatgagatcacggaacgatttgtgcgtggcgacagttcaagaaacacagaaggttccggacttggtcttgcgatcgcaaaaagttttaccgaagcccagggcggcgaattccacgtcgaggtcgacggggacctgttcaaagttgtcattttgttttagggacgggtgtgttataataccgtttagaaaatgtagatctctgcaaaactcaacaaaatgtggagctattgcgagagactgacaaatgaataagaaggtgctggggagccgccggtacttagtgaccgtattttggtcacttagtatccgttgcgagcgacacgcagcggaagcgtgccttcgtttcatgtgtcagtctctcgcaatttcagaaaatgtggatgagttttgcaggtattagaattaacaaatgggaggataacaaaatggaaacaatggacgactacaaagacgaactggaagcctctttccgcaggatcaacgagggagacatcatttccggtacagtcattgatgtaaatgaagaggaagtgactctggatttaaaatattatgcgcagggaatcatcaaagttgctgatctgagcaatgatcctgattttaatgtcatggaacaggtacacaagggagatgtgatcgaggcaactgtggtacagacggacgatggtgccggaaatatcgtactttccaaaaaggaagcgaacgatatactcgcatgggataaattaaaacagatgatggaagatgagacaacagtcaaagtccgcatcaaagagagcgtaccgagcggcgttgtcacctatctggaaggcatccgtgcatttatcccggcatcccagatcacacttgactatgtggaagatactgacgcgtggatcggaaaagagatcgaggtacgcgtgatcactgtggatgcagaaaaagaaaaacttgttttatccggcaaggcagtagcaagagaggcagaagccgaagaacgtaaccacaagatctccatgatcgtgcctggcactgtcatggaaggaactgttgagtcactgatgccatatggtgcattcataaaccttggaaacggactgagtggtctggtacatatttcacagatctgtgagcgccgtatcaaaaagccgtccgaagtgttaaaagagggacagaaggtaaaagtaaaagttgtcaataccaacgataataagatcagcctcagcatgaaagcactgcaggaagagatggttgataccgaaggtgttgcagaggaagaattagaaaaatataccgatacagaatccacaggcaccagcctgggctctttactggcaggatttcactttgacgcgtaagcagtaaaaacatcagaggcatcaagagacaagaatcttgacgcctctgttttttgccccagaatctttgtcatacattgttgacaaggaaacaaacttgcgctatattaaaacagaagtaattgttgacaaggaaacaatatttgcttttatgtaagggagtggatgtatgaaagagcaggaacttctgttaaaagagcttgcgctgatgttagagcggcaggacatgctctcgaagctgaccgaagggaaatgtctcgatgagtatggatattccgagacacactgtattgattatatcggaaggttagagctgccgaatgtcacaaagatcgcagaacatatggggatgacaagaggcgcgatcagcaaaatgacaaagaagctgttagcgaaaggtctgattgaaaaatacactttggaatcgaacaaaaaagaagtctattttaaactgacggatctaggaaaaatgttgtttgaggaacatgcaaaacgtcacaaacgctgggaaaaaagggatatggagtttttgtcccattattctacagaggatgtaaagacggtgtatcagtttatgaaagaatttaatcactacttagagggacagattgaagaattatcataacgatgtaggaaagtatgaaacagttacggatcagacagaagttttgagatccataggatcgacataaaaattgcctgcgggcaatccgcaggcaacaggatatttaagattcactgtcagtgtctgtactgacatcgtcattagtatctgtgctgacagctgcatcaatatctgtgtttgtttcagtatcagtatcttcgtccgtatctgtttctgcagaaggaatcacgcgtacagggatgtcttttgtgatatcttcaattgtttcagaatcagaatttatggaagtaaggactgcagtgcggtcggatggggtttcagaggtacttcccacagcagatgatgtagtatccgtattctgtaaagcagaagagacatctgttgatgttgtctgaccagatatcatattttttaattttaaaatagcagttaagatatctaatgcatctttgctgatatttttggatgagaagaaatcagcaagcatctgatttgcctcatctctcgcacttccggtcaggttgaaaatagaagaaagctgatctgaaacagaagatacggtatttgaaacagcagaaccaaattcttccatataagagagtacttttttgacgtaattctgtgtctcggtaaaaggcgggatgccgccgtatttgtctacattcgcgctgccggcattgtaagcggcgagcgcaagggagatatttccctgataattggataataactggctgatatattttgcaccgcccatgatattttctcttgcatcataggaattggaaacaccaagagcagcagcggtagatggcattaactgcatgatcccgacagcgcctgcattgctcacggcagagggattgaagccggattctgctttggcgatcgattttaatataatagaagaaacaccataggaattggcggcctcttcaaaaatagagtcaagttcgcctgaagtataggaatttgcagaggatgcagttgtctgggctgcggatatccctgatgtatctgcgcctgtggtaccggtctgtgaggtattctggctgttttccaaagcttttgtactgtcagctaacgcagccgcaaaatcatccgtattagactgttttgcagcttcggcacgctttgcagcctgttcattgatgcggctgactaatgcgtgatccatataatttaaaacggtaatactcattcataactccttttcgtgtaaaacgcgactaaaaagagtatagcacatgtttttgcaatagtgaagtttttgttgaaaattgtcttgatgtatcacaaaaattgttgtagagtacatagtgcgacaagctaaagtgataaagtaacagggatagaaaaaagaaatggattgtgaaatagaaaaaaacaaagtaagtaaaaaagcttcctatgaaaaagcgtttaaagctgcatttccatatacaataccggtcatgacgggatatctgtttatcggtatggcttttggagtgatgattcaggaaaaagggtataattttctgtgggcaatactgatgagcgtcctgtgttatgcagggagtggacagtatctcgccgtgaatttttttgcgccgggcgtgagtcttttacaggtaattttcatggagtttatgttaaatatccggcatattttttatggtctgtcgttattagaacgttttgcaaagatggggaagaagcgtctgtatatgatcttttccctgacagatgaaacatattccttattttttgtcacgaaggtgccaaaggatgtggaagaaggacagtttttatttgcaatcgcactgttagaccagctttactggatcatcggttccgcaatcggggcactgcttggatcagtacttccaatcgacacgacaggaattgattttgcgatgacggcgttgttcgtcgtgatcatggtggagcagtggatggagtcaaaaaaccgtccgagcgtacggatcggacttggatgcggactggtttgtcttctgatctttggcgcagacaattttattctgccgaccatgatctgtattatgctgatcctgcttccgtgcagaaagtttttggataaagaaacagaccagaaaaaggaggtagagcatcatgccggttagtgtggcgcgttcacttgttatcattgcagcagttgcgggaacgatcttttttacaagactctgcccgtttttattctttccgccgggaaaaccgatcccgccggtgatacagtatcttggaaaagtattgccgccggcagtcatcggaatgttggtgatttattgtttaaaggcggtaagtatcacatcctatccatatggattaccggagtttatagcggtggcagtagtgatactgcttcatgtctggaaacgaaacaacctgcttagtatcggcgtcgggacagtgctttatatggtgctgatacaggctgtattttaataaaatggaggaatattatgaagaagaaaccttttgtaaccaaagaacagctcgaagagatcgtaaaaaaatatccgacaccgtttcatctctacgatgaaaaaggaatccgtgaaaatgcgaaggcggtcaaggaagcattttcctggaatcccggatttcgtgagtattttgcggtaaaggcaacgccaaacccgtacatccttgatatcctaaaagaatatgactgcggctgcgactgtgcatccttaacagaactgatgttggcagactctcagggatttgacggaaagcacatcatgttttcctcaaacgatacacctgccgaggagtttaaatttgccaatgaacttggtgcgatcatcaacttagatgattttacccacattgactttttagagaaaacgatcggcaaaattcctgagacgatcagctgccgttataatccgggcggagtctttaagatgagcaatggcatcatggataatcctggtgatgccaaatatggttttacacatgagcagatcatcgagggatttaagatcttaaaagaaaaaggcgcaaaacatttcggcgtacatgcattcttagcgagcaacaccgtgacaaatgaatattacccgaaactggcaagacagttgttcgaactggttgtggaactgcgtgacaagaccggatgtgatatccagtttatcaacctttccggcggtgtcggtgtgccttatacaccggatcagacaccgaacgatatccgcgtgatcggacagggggtcaaggaagcttttgaggagatcttagttccggcaggacttggaaatatctctatttatacagagatgggacgtttcatgttagcaccttacggctgccttgtgacgaaagcaatccatgagaaacacacctataaagagtatatcggtgtggatgcctgtgcagtcaacctgatgcgtccggcaatttacggggcatatcatcacatcaccgttatgggaaaagaggacgagccttgcgaccacaaatatgatgtgacaggttccctctgcgagaactgtgataaatttgccattgaccgtatgctgccgaagatcgatatgggagatctgcttgtgatccacgatgcaggagcacatggtttctccatgggatataactataacggaaaactgcgctccgcggaggtattgttaaaagaggatggttccacccagctgatccgccgtgcagagacaccggatgattacttcagaacttttgactgctttgatattttaaaggatatgaagcatccggagagaaaataagacttcattctgcaagaggagtgtgtcatgtgtattgatgaattgaggtttgaagctgcaaaaaacagagtgatcgggataaacagggagcgtcagggaatcgggacgctctcagagaaaacggtacatgccgttttgaaaaattattatgcgccggatacggatatgcacgaaatcccaatcgaaaattttgtggcggacatttttacggggaccgagatcattgagatacagacacgctcctttcaggttatgcggagaaaactggatgcgttcttaaaaatctatccggtcacgatcgtctatccgatcccgcatgtcaaatggcttttgtggatcgatgaggagagtggcgagatgtcaccgaagcgcaagtcccccaaaaaaggaaatccgtatgtggcatttaaagaattgtataaaatacgtccgtttttaaaaaatgaaaacttaagatttcggtttgcactgatcgatatggaggagtaccgcctgttaaacggctggagcaaagataaaaagaaaggcagtgagcgctacgaccggatcccggtgcagtttgtggaggaagtctgtattgagagacgggaagattatatgcagtttatcccatttgacctgccggaaccttttactacgaaagatttttcaaaatctgcaaaaattccgttgtcgcttgcacagactgtgcttctgattctgacagatttagaaatcgtggacagagtgggaaaacaggggaatagttacctgtataaagtctgtgagatataagaaaaagggtatctggcttttaatagttactcacgatcagtctgcgccggaacacggaatccatatgatcgagtgtatgtcttgcctgggaatagcggttgcggttggtatggatgacataaaactggtgtgcaccccggtatttttcgcgcagaaaaaatggtatcttaataaaactccgcgtaaatggaatctgattttcaatcaataactgtgccgcctgatcactgatccgctcattggttgtgcggcataactctatatctttgtcgagatgttttgtatcttttcctaatataagtgcttttcccatagtttcttcccctttttcaaaaaactatcatatacgataacttttgtcaaacatacttttatttttgcagaaattgtggtatgttattaaagttagacggaaaagcttgtcttaaaggattagaaaggtaattataattatgaagaaaaaagtagtagtattaatgctttgtacgatgatggcagtcactgcactcggatgcggcgggaagaagaatgataccgcagaggggacagaggctgcagaatcagtaaacggcacggaaacagcagaaggaacagaaacagtggaatatgagagtccttcttatgatctggatccttccgattatgtgacactctgtgattacagcaaggttccggttacgatcacaggcgattatgatgtggatgaccaggatgcaaaagattattttgagcagatgttttcttattacggaccgttctacgttgcagatgataccaaaacgaccgttggagatggtgatatcgtaaacgtggactatgttggaaaattagacggagtggcatttgataatggaagtgccgaggatcagaatatcgatgtggacaataactgttccgcaggaagccagtcaagctcctttatcgacggctttacagatgatctgaaaggtgcatctgtcggtgatgttattgacagcgatgtgacattcccggataactatggcaatgcagaccttgctggaaaacaggttgtattcacatttaccgtcaactcaatccagaaagagatgacactcgatgatgtggatgacgattttgcgcagaaacagtttcaggctgacacagtagatgatatgtatgcacagattaaatcattccttgaaaatcaggccagcagcaataaggacagtgacacttacacagcagtgcaggagtacctgttagaaaactgtaaagtggatatcccggaagattatctgacagcccgtgtcaatgattatgagaaacagtatgtacagaattactgtgatggggatgcatccaaacttgaggattacgtcagcagccagtacaacatgacacttgatgaggtgcgtcaggagtggaaatcaggcatggagaaaaatatttccatggagtttatcacaggtgcgatcgcagcaaaagagggcaccgagcttgacgaggacggattttcttcttatgtgcagactctgatgagcaataacagtctgtcatctgaagacgatttatataagaactatggctacggtgatgcagcttatggtgaaaaatatttaagacaggtctatgttgataatcttgcattgcagtctgtcaaagataatgcggatgtgactgtggaagctccggcggagacagagagtactgagggcacagagagtgcagaaccgcaggaagctgtcgacgctgccgagacagaaacagcaaattaatcaaataaatatcccaaaagaagaccaaagagatggggattggaggattcaattatggatatggtaaatgtaagggatttattccggaaacaggaagaatatgtggatcagaccgtgacgatcggtggatgggtgcggagcatccgtaattccaaaaattttggatttatcgtggtaaacgatggaacattttttgagccggttcaggtcgtatattccaatgttttagagaactttgatgacgttgaaaagttaaatgtcggtgcagcgatcatcgtgacaggtaaacttgttgcgacaccgggaaccaagcagccgtttgagatccaggcagagcagatcgagatcgagggtgtttccacaccggattatccgcttcagaaaaagaaacacagctttgagtatttaagaacgatctcccacttaagaccgagaacaaatacatttgaggcagttttccgtgtgcgttccctgattgcatatgcaattcacaaatttttccaggagagagattttgtatatgtacacacaccactgatcacaggaagcgactgtgagggtgccggagagatgttccaggtaacaacattggatatgaacaatcttccgaaaaatccggacggaactgtggattattccaaagatttctttaataagccgaccaaccttaccgtaagcggacagttaaacggtgagacttatgcgatggcatttaagaacatctacacatttggaccgacgttccgtgcagaaaattccaacacgaccagacatgcagcagagttctggatgatcgagccggagatcgcatttgcagatctggaagatgacatgatcttagccgagagcatgttaaaatacatcatcaactatgtactggagaatgcaccggaagagatggcatttttcaacaacttcattgacaaaggactcttagagcgcttgcagcatgtggcaaattccgattttgcccgcgtgacatacacagaggcagttgagatcttagagaaacacaatgacaagtttgaatataaagtttcctggggaactgatcttcagacggagcatgagcgttatctgaccgaggagatcttcaaacgtccggtattcgtaaccgattacccgaaggagatcaaggcattctacatgaagatgaatgatgacggaaagaccgtagcagccgttgactgtctggtacctggtatcggtgagatcatcggaggaagccagagagaggatgattacgataaacttcttgcaagaatcaatgaactcggcttaaaagaagaagattatcagttttatctggatctccgcaaatatggttctgcaagacatgcgggattcggactcggtttcgagcgctgcgttatgtacttgacaggaatgtctaacatccgtgatgttattccgttcccaagaaccgtaaataactgcgaattataaaaaagaatagagttacagaggactgccgcccggatgaataagattctgcgggcggcagttttttgatatccgaatcttcataggaaaatgcgttctgcaaatttgtgtaaacctcccaaaaacctgcaaaaattgagaaaaaatgtagcataaatataattgacataatgtataataagtagtagtatcaaaatacaaaagatatagtaacaaatactacatgtaaaaataataaatactattttgctaaaaggaggtcatattatgttacagatagggattcgtgaaccgggaagcgccattacacattttatagctatgatgatggcaatatttgccacatcaccgttgttagtcaaggctgcgctgaatggaaatcatacaacgattctggcaatggcagtgtttatgggaagcatggtgctgctttatggtgcaagtacggtgtaccattcgcttgttgtccgggataaaattttaaagatattccgcaaactcgaccatatgatgatatttgtcctgattgccggatcttatacgccggtatgtctgatcgtacttggcgggaagtcgggttatacgctgcttgcggcagtgtggggcattgcggcggcaggaatgctgataaaagtgctctggatcaactgcccgaagtggttttcatccgtgatctatatcgcaatgggatgggtgtgtctgtttgtattccgggaactgttagccactctttcccaggcagcatttttgtggctgcttgcaggcggtctgatctatactgtcggcggtgtgatctatgcattaaaactgccggtgttcaacgcgaagcacagtcagtttggctcccatgaagtatttcatctgtttgtcatggctggaagcatctgccattttgtattcatgtatcagtatgtagcgtgaaaaataaaacgattgccggatagattttatggaaaagttaggttataatgtaacagcaatgaaaaatgagcagtgacaggcagatgagaaatgaaatgcctgtatgaagaggagacagatatgagatatacgttggaaaatgaaaatttaaaagtggagattgactcatttggagcagagatcaaatctgtaaaaagaaaatcagataactttgaatatatgtggtgtggtgataaaaagtactggggcagaacatcccctgtattatttccgtttgtcggtgcgccgaaaaacaaagaataccgttatgacggaaaaacttatacgatgggacagcacggatttgcaagagatatggagtttacattagaggcacagacggaagagaacatctcatttgtactgaccgatactgcggaaacctgtgaaaaatatccatttcattttgcgctgcacattggttatgaattgtgcaaaaacgaggtgaaagtaaactggactgtggaaaacaccgacacaaaagaattatatttttccatcggtgcacatccggcattcaactgcccggttcacggagaggaaaataaaaccggatatggtctcaaatttggcggcctggcagatactattcatcatcatggaaacacaccggacggtatggcggtgatggaggataaagtcctggcactgaaagatggctgtgtgacatttacggaaggattctttgatgagtgcacttacatggtcgaaggaaaacagaccggagaggtttccctgcttgaccgtgaaggcatcccgtatgtaaccgtaaaatttgacactccactatttgcagtatggtcaccggaaggaaaaaatgcacctttcgtctgcattgaaccatggtacggaagatgcgatgccacagattttaccggcacattgcagcagcgcgactacgaaaacatgctgccgcagggcggaacattcaaggcagcttatagtattgcatatctgtaagatagagtcagcaaaaggtggatcataaaaataaaaaacgcaaaagcatgtaaaaaaagcatagcttttgcgtttttttcatatagtgaaacagaatcgaaaacctgtggagtggtcaatgaatatacagtcaaaaatgaaaacaagagatgcaaaaaacaatccggtcactgcggtattggtgtccgtgctggtcatgttccttttaagctgcctgttcctgttactgttggctgcactgttatataagtttgatctgagtgaatcggcagtaaaggtgggaatcgttgtcatttatatcgtctccggagtgatcggtggatttttcatgggaaagatcatgaaaacacagaaatttttatggggatttgcagcgggagccatttatttttgcattttattcctgatatcagtgctggttaaacagggagtctccatggaactgccgaaagtggcgacaacatttattctatgtgcggcatccgggatggcaggtggaatgataagttagtggttactgtcagggtgccaattagcatatagacaggacttgcgcagaatatcagcggcgtgctatactcaaagaaaatgtgcatgaatgaaaaaaattatcaatgtttcatgcagaaaaagatacgcacgaggaggaagacatggaaagacagaagagacagggagcagagtacgagttttacggaaaactcccgctgaaaaaggcaatcccgctgggattacagcatgtgctggcaatgtttgtgggaaacctgacaccgatactgatcatctcaggggcatgtggtattgcaggtgaggagttcggcagtctgcaggtcgatctgctgcagaatgcgatgctgatcgccgggatcgtaacactgatccagttatttgcgatcggaccggttggtggaaaggtaccgatcatcatgggaacgagttccggatttatcggtgtgtttaacagtgtggttcaggtaatgggaggaggaatccttgcatatggagccattatgtgtgcatccgtcattggtggtctgtttgagggaatccttggatttctgttaaagccgctccgcagatttttccctgcggttgtaacgggaaccgttgtactgtcgatcggattgtcactgatcgcggtcggcgtcaattcttttggcggcggcaatacggcaaacgactttggttcagtagaaaatttactgctcggagcagctgttttactgatcattgtagcagtgaaacactggatgaaaggtatggcgagtgcatcatcgatcctgatcggtattgtggcaggctatatcattgctgcgatcatgggactggtactgccgacaacagcagtcaatgcggatggtgtggaatacacaaaagcctgggtgttaaactgggataaggttgcaaatgcagcctggttttccgttccgaaattaatgccggtcaaactggtatttgactggagagcaatcattccggttctgatcatgtttgttgttaccgcggttgaaacagtcggagatatctccggtgttatggaaggtggaatgggcagagaagctaccgacaaagaactttccggcggtgtcatctgtgatggaattggttcttcgcttgcagcactttttggtgttctgccgaatacttctttcagtcagaatgtaggacttgtcacaatgacgaaaatcgtaaaccgtatggcgcttgcatccggagccgtattcctgattttatgtggtttattcccgaaacttgcagcactgatttcaatcatgccgcagagtgtacttggaggagctgccgttatgatgttttcatccatcgtgatcagcggaatccagcttattaccaaagaaccgatgacgatgcgcaatatcacgatcgtctccgtcgcattgggacttggctatggaatcggatccagcagcggcatccttgcacatctgccgcagggcatccagctgatctttggcggttccggtattgttccggcagccattgtggcgatcatctttaatattatcctgccgaaggatgcggaataaaaaaaacttcccatatgaaaaaagttatgttatactatacaggttaatagaactccgcgcgaaagcgaataaatacatagtattacggggagcgggcaaatggcgtatcccatgtgtgcggaaattacaaaaaaggagagaagcatcatgaaacatgtaaagacattaaataccaagagattacagaacacaatcaaaaaaggcggctgcggcgagtgccagacatcctgccagtctgcatgcaaaacatcctgtacagtaggaaaccagagctgcgagcacaaataagatttgagctggtacagccgggcatgcatagcatggtaaaaattgtgcatatgagtgccggatatgccatcatggcatcatacaaaatgactgtgtgatacaacgatgaaaatcatacggtcgtatataagtgaaatctgcaaacgaccgttcgcatagcgtgcggtcatttgtacgttttatcggcaacattaaaatgccgtaatacttgaaaaaaatatattgatttgcagaaaactttaaatgttttgctgtaaaatcagatagaaagagaggaaatattatagtggttcatcagtataagaacaacggctatgatattgttttagatgtaaacagcggagcgattcatgtggtggatgacgtgacttatgatgtcattgagatgatcgatcagagccagccggaatcgtatgcaagggatgagatcgtatctgcactgtccggaaaatacggcaaagaggaagtggaggaagcaatcgatgaagtccagacattgatcgatgaggagtcactttttacaaaggacacttacgaaaactatatcatggatttcaaaaaacgcccgacggttgtcaaggcactctgcctgcatattgcacatgactgcaacctggcatgtcagtactgctttgctgaggagggagagtaccatggaagaagggcactgatgtcctttgaagttggaaagaaagcactggatttcttaattgccaattcaggtaacagacgaaatcttgaggtggatttctttggcggcgagccgcttatgaactggcaggtcgtaaaagacttagttgcctatggaagagagcaggaaaagctgcatgacaagaatttccgttttacactgaccacaaatggtgtgcttttaaatgacgagatcatggaattctgtaataaagagatggcaaatgtggtcttaagtatcgatggaagaaaggaaattcatgataagatgcgtccgttccgcaaaggggcaggaagttatgatctgatcgttccaaagttccagaaatttgcagagagcagacatcaggacaaatattatgtgcgtggtacattcacacactacaatcctgattttgcagcagatgtacttcatcttgcggatcttggtttcaaacagatctccgtggagccggtagttgcagaaccgagtgaaccgtatgcgatcacagaggaagatcttccacagctgtttgaggaatatgacaaacttgcagcggagatggtaagacgtcacaaagagggagatgattttaatttcttccattttatgatcgatcttgagggcggtccatgtgtggcaaaacgtctgtccggctgtggttcaggaaccgagtaccttgcagtgacaccatggggagatttttatccatgtcaccagtttgtcggcaatgaaaagtttttacttggcaatgtggatgaaggtataaaaaatacagagatccgtgatgagtttaagtgctgtaatgtctatgcaaaagaaaaatgcagaaaatgtttcgcaagattctactgcagcggcggatgtgcagcaaatgcgtataatttcagcggtgacatctgtggggcatatgatatcggatgtgaattgcagaaaaaacgtattgagtgcgcgatcatgattaaggctgccgaggccgattgtgaataaataagaaacaggaaggaaaaagaaaatgaaaaagagtaaagcagcagtcatattagttgcgattctcgctgcatttgcgggacttgcctattatgcatctattattctttcatcgaccggtattggggaagaaatgagtattccgcttggacttgatctgtccggtggtgtatcgatcacctatcaggtcatggatgaaaatccgagtgcagaggatatgagtgatacgatttacaaactccagaagcgtgtggaaagttacagtacagaggcatccgtatatcaggttggagatgatcgtatcgccgttgagatcccgggtgttacggacgcaagcaagattttggaagaacttggtaatccgggttccttagagttccagctttcagatggtaccgtatttatgacgggtgaccaggtggcagatgcacaggctgcaacaaccacagatcagtatggaaacaagcagtatgtggtacagcttacactgacagatgagggagcaaagactttcggagaagttacttctgaaaacgtcggaaaagcacttccaatcgtatacgatggagaagttatcagttatccgactgttcaggaggcaattaccggaggtactgcacagatttccggtcagagcacctttgaagaggcacagactttagcaacacagatcagaatcggttctctttccctgcagttatcagagttagagtccagtgtggtaggagcacagcttggaagccaggcaatctcctccagtttaaaagcggcagcaatcggtcttgtgatcgtaatggtatttatgatcattgtatatgcagttccgggtgtcgcagcagctttagcacttgcaatttatacagcacttgtgattgcaactttatacttattcgagatcacattaacattacctggtattgccggtattatcttaagtattggtatggcagtggatgcgaacgttatcatctttgcacgtatccgtgaagaaattgcatcaggaaaatccgtgattactgcaatgaagaatggtttccacaaagcgatgtctgcaatcttagatggtaatatcacaacattgattgcagcgattgttcttatgggattaggttccggtactgtaaaaggatttgcatatacactgatgatcggtattatcctttccatgtttacagcacttgttgtcacaagatggatcctttattctttctactggttaggaatgagagatgaaaaattctacggacgtgcaaaagagagaaagacgatcaatttcctgcagaagagatatgtattctttgcaatttctattgcagttatagctgccggatttatcggtatgggagtacataaggcatctggtcagaactccctgaattatggacttgacttcatgggaggaacttccactactgctgatttcggcaaagaatatacgatcgaagatattgaaaatgatattatcccggttgtaaaagaagtaactggagacagcaatattcaggcaaacaaagtagagggaacaactcagattacgatcaagacacgtactttatccaaagaagagcgtgatgatctgaataataagctggcagacagttttgatgtagatgaatccaccattacattccagagtatcagttccacgatcagtggtgagatgcgtgcggatgcagtcaaggcggttattatctcaacaatctgtatgctgatctatatctggttccgttttaaagatatccgtttcggtgccagtgcgatcattgccctgatccacgacgtactggttgtacttaccgtatatgcgctgatgcgtatttcagtcggcaatacatttatcgcatgtatgctgacgatcattggttattctgtcaacgatacgatcgttatctttgaccgtatccgtgagaaccttgcattaaagcatggaaaacagacaagggaagatctgatggaagtagcaaaccgaagcctgacacagaccttatcacgaagcatcaacacatccataacaacatttattatggtatttatgctgttccttcttggtgtagcaagtattcgtgaatttgcgctgccactgatggcaggtatgatctgcggtgcatattcatctatctgcattgcaaccgagttgtggtatgtgatgaaagttcatcttggtaaaaataaaataacagaataagatctgttgaagaaaagtgaaagtcctggcagttatttgccgggacttttaagattcataggaaattacgtcctatgaatcttaaagccctccgggcgggatcacactgcgtcggagatgaattatgtcgcggaggcgacaccgccgcaggcggtgaatcctgtaggacaggattctattttagaaaaaaggagaaacatatggatacgatcgcagcttatctgatctttttaaatctggtgggcttccttattatgggagaggataaaagaagggcgaaaatgcatcgatggcggatctcagaaagaatgttgtttttagtcagcattttaggcggcagtatcggaacgtgggcgggaatgtatgtgttccgccacaagacgagacactggtattttgttatgggaatgccgctgatcctcattttacagatcgcaggtgccatctggctttatcgtcagggcttatatcatttataataatttgatataactattctggcatttggaattgccaaaaaaaggaaagtcatatataatgataaacatagcaaaaaacaagtgtttttcgtagaaagacacattgatcaaacagcaaagaaagggagaattacggattatgtatacactggaagatattcaggcagttgatatggaagtggcaaatgccatcaccgatgaatttgaacgtcagaacagtcatattgagctgattgcatccgaaaactgggtaagcaaggcagtgatgtcggcgatgggcagtgttcttacaaataaatatgcagaaggttatccggggaaaagatattacggcggatgtgagtgtgtggatgttgtagaggaacttgcaagagagcgtgcgaaagagctgtttggctgtgagtatgcgaacgtacagccacattccggtgcacaggcgaatatggctgtacagtttgccatcttaaaaccgggtgacacggtcatgggaatgaacttagatcacggcggacatttgacacacggaagccctgtaaacttttccggtacttattttcacattgtaccttacggtgtcaatgacgagggatttattgattatgacaaagtagaagagatcgcgatggagtgcaagccgaagatgatcatcgcaggtgcaagtgcttatgcgagaaccattgatttcaagagattccgtgagatcgcagatgcatgcggagcagttctgatggtcgatatggcacatatcgcaggacttgtcgctgcaggacttcatccaagcccaatcccgtatgcacacgttgtcacaaccacaacacacaagacactgcgtggaccgcgtggaggtatgatcttatccagtcaggaaatcgcagacaaatataactttaacaaagctattttccctggaatccagggcggacctttgatgcatgtgatcgcagcgaaagcagtctgctttaaggaggcacttcagccggagtttaaagtataccagcagaatatcattgacaatgcacaggcactctgcaagggactgttaagccgtgatattaaaatcgtatccggcggtacagacaatcacctgatgcttgttgatctgacaaattatgatcagaccggaaaggcagtggagaaacttctcgattctgtcaatattacctgcaacaagaatacgatcccgaacgatccgaaatccccattcgtaacaagcggtgtacgtcttggaacgccggcagttacttcccgtggactaaacacagaggatatggatcagattgcagaggcaatcgccatgatgatcaaggagggtgaaccggcagctgataaagcgtgtgcaatcgtaaaatcgctgacagagaaatatccgctggagagataaaagagaatagaatataatttaataatgaataaaaaatgaggaacctgtttcgtgacaggttcctctttttttgtgacctttgagtttgttattttacatcatctgcaatacggtacagtgtgtacgaggtagaaatcgtatttttatttttatcgagatatgtgattttcacgattgtcggtgccataatatcaccatcacggctgtatgactcataagagtaagtaccatatgcgtaagagtagtcatgtccgtaatagtatccataatgtcctaactggatactctttccattttttaccttttttgttatctcggagtttgaataagtggttgaataggaagaatttgtttttgcaactggcttgctgtaagtagagtattcgatcttctttaatttataacccttgttcattttgacattgactttgacagaatttttattgtagactgcctttgcgtaatcatattctttgttgttaaaagttacactcttaaaaggactattgttagagaatgtcggctcggttacattgactttgacagtaaattttttaatctttttattctgtgcattatatacatcaaaagatactgtgtatttaccggttttcttggcatagacaccaacgtatccggaattactggagctggaaagtgaaagtcttgttactttggctttcaggtttttgctcgatgttttgatatttttgatgttttttccgtttgtaccgagctgtacggagatagccgaatcattgaccatcggataatttttgtaataagaaacatctacagcctttggggcgcttggacctgttgcagcagataccggcgcagaagggatcagtaataatccggcgcacaggcaaagtgtaagaacagcgcaagtaatttgcttaaataatttcatatcagatatcctcctgttggattattttgcaagacgggaaatggaataaatactctcacattcctgcttggtatatttgtcgatataagtaatagtgatcttggtacgcgcagcaagtgaggtagaatagtttctgccgctggaatatgaattatcaaatatatatgcgtactcgccaagctttaaggtgctgttgtttttcattgtttttacaacttctttacctgccttattgtaagtggtgacagtgatttttttcagcgtgtaacctttgttcattttaacagataatttgccggattttttgctcgtaagggcataattaacttctttacctgcaaatttgacagatttgactggcaggtcattttttacatatactgttactttacccgaagaaagtttgtttcctgatttatcgcagatattataggtgactttgtatttaccggtttttttggcatagaggccgatagacgcaaaggtatccgtgtatgtatcgtctgaactggtagtataatagtgggtgttttttgcaatcagatttttactgctggttttgatgtttttgatataacatactttggcttttggcagattgacatagattgcagaactgtcgaaagaattactggacatgcgaagtacagtggtggtcggtttgttcctgacggctgcggataccgttgactgcggctgcagtaaaagcatcccggcacagagacagaaagctaaaaataagctgactgttcgtttgaaaattttcataagtgaatccttcttgtttataaatattttatagatgttacaaaaacattataatatgaaggaaaattttatacaatcataaattaaaaaataaataagggaattttaagaaaatttatagcattatatcaggtaattttgatatgcccaaacttgtattttatgtcaggttattttataattgcatacaatagattgtgtattttatgagcggggggagagaagaaaaaacagaaacccagcctgcctgtaaaatatgcagaaacgaggaatatatgaaaaaacagaataaaggagttccgacaaaccgtgatatccgttgggacagacttgataatacagcacacctttttccggtcattgccggggagagcatgagcaatgtgtacaggatcagtgttacactgaaagaggagatcaatccggaattactgcagagggcacttgatatggtgcttccgaagtttgacgggtttaacttaagactgcggcagggggtgttctggtattattttgaggaaaacggaaaagcggcgccaaaggttcgcatggagaacaattttccatgtagatatatccagcagaataaaaaccgcagttatatgttccgtgtgacctattataaatgcaggatcaatctggaagtattccatgttttgacggatggaatgggaggaatcaatttcttaaaagagctgacttaccagtatctgcgtctggcacataaagacctgcaggaaaagctgggagattcattaagtgttgatacgtctttgaaccgggaagacagtttcttaaaaaattacaaaaaaagttccgcaaaaggataccagacaaaaaaggcatatctgatccgtggagaaaagttaagaccgggcgagttcggcgtgatgcacggttatatgaaaataccggagttgaaacgggtctgtcatgcgatggaaatcagtatcaacgaatatctggtaagtgtgtacatctggagcgtttatacagaatgtctgcacggcatgccgtcaaagtgtccgatccgtgttgcggtgccggttaatctgcggccgtattttaattctattaccacgaaaaacttttttgtcatggtgtccgcagaatttcatccgaccaaagagacctatacgtttgcagaggtggctgcaatcgtgaaggaaagcctgcgaagccagatcaaccgggaaaatcttgaaaagctgttttcctataacgtttccaatgaaaaactgctgattgcaagagttgtgccgcttttcctgaaaaaccttgcaatgaagtatgtatatacaacttctgcacttgccaatactgcgacgatcacaaatatcggcaatatttccgtgacagaagagtaccgcccttatgtggaaatgtttcatgcatttcttgccatgtcaaaggggcagcatctgaaaggaacgatctgctcttacggggatacacttgtattcagtttcagttatgatcttgtcgatgcgtctgtgcagcgtggatttttccggaaaatagcctcggacgggattgcggtagaaataaagagtaatggagtaaattatgagtaaatgcagaaattgtaatgtggagatatcagatgaaacagagcgctgtccactctgcggatccgtgttagaatacacaggtgaagtggagaatatgtacccggatgtgagagtgcacacccggaaaatgacaatgatcagtaaaatctatctgttttgtgcacttttggttgaggtgctgctcatttatatcaatgtggtcaccgagtcacagattgcatggagtgcgatcacggggcttggattcttttacggatatatgctgatccgttttgcaattcttggaaagacaggttaccgcgccaaaatcacggtactcacgctgatggcgatactgatcgtgatcgcaatcgattttctggtcggctaccgcggatggtctgtcaattatgcattgccgtcggcgatcattttagtcgatgttggtattatcatctgtatgatcgtaaaccgcagaaactggcagagctatatgatgtggcagatttttatgattttatgcagcattgttccggtaatactgatttttaccggtatcgtgacggcacagctttttgcactgatcgcatttgcgttttccctgtttctgtttcttggaacactgatcatcggagaccgcagggcaagggtggaactgaaacgaagatttcatgtccgctgagttatatttagaataaaaagaacaggagcaatcggatgagagagagcgaagcgagtatcaggggaagagtcatgagggacctgatcgcccatgtgacaaatgatcacctgattgggaaaaagataaaaaatggagaactgaggaaaaaaatcggggattcggagccgccgtggaaatgtccggactgtttttcattagatgtgatcgagatggataatttctccatggagtatttacaggcaaaagaaaatccgaatacggaaaaagtaatcttacagcttcacggaggcggatatgtcggagcgatgcggaatgcataccgtatgtttgccggactttactgtgaagtcagccatggaatgagtgttctgacacccgattaccgtgtggcaccggaacatccgtatccggcggctttagaagatgcctatgccgcatactgttatctgttggaacaggggtggttttccgagcagatcatcatcgcaggagattccgcaggaggcggtcttgcgatggcattatgccattatctgaaagatcacggaaagcagcttccgtgtgggatcgtagccatgtcaccgtggacagaccttgcggcgagcggggaatcttacgagacaaactttgagcgcgacccgttatttggaaaaacaagggacagccttatttataataaagattatattggggataacgatccgtataatgcttatatttcgcctttatatggggatttcaggggatttccgccgatgctgatacaggttggttcctatgagatgctgctctcggattctgtggatgtggctgcaaaagccagagaacagggagtaaaagtaagaatcagtatttatgaaggaatgttccacatctttcagatggcagcaaaaatgctgccggaatctaaaagagcgtgggttgagatcggtaaatttattgatgttttgctaaatgactgacatccatatagacagggataccgttttcgtattttaccggaacttcaccgagtatgagaggtgaaaggtaatcgatcagtggctgtgtgacatcattgcctgcatcattgatccattctctcggaattgattttgcctcgtttgcaatgtggcggatctcggcatgctcataggcgatttcgtacggagaatcagagatacggcgtattgttaccatggaagcggtaacaccttcctcggagagagcaaccgctttctgaccgagagtaaaagcctcatcaagatcagtctttgaagcaaggtgtgcagcgcagcgctgtaatacgttgacttccacggaacggactttaacgcctagtttttctttgactaaaaattcaagtgtttttccggctccgcttaactggctgtgaccaaaggtgtcaacagaactttcggaagcactgatatagttgccggaagcatcgcggataccttcagatacggcaacgatcacgttattgcgctcgaaaagcatacgctttacatccagtaaaaagtcctctttgtcaaatggaacctccgggagatagatcagatgtggtgctgtattataaccgtttcttgccagtgcagaagcagcggtcagccatccggcatcacgtcccatgatttccacgatcgtcacacttttgactgcatagataaatgtgtcatgtgcgatttctaaaagagaagatgcgatatattttgcggcagaaccgaatcctggtgtatggtctgtctcacagagatcattgtcgatggtctttggaataccgacaatacgcaccggactgccgatttttttgccatattcggagagctttaagacggtgtccatagaatcgttgccgccgatataaaagaaggcatcaatatggtaagtttcaaactgtttgaaaatgaatacataggaagaatcatcatctaaataatttggcagtttgtaacggcaggagccaagatacattgccggagtgacctttaagcggtcgagatattccgaattctgctgcattaattcagaaagattcgtcagatcgttgtttaaaatacctgtgattccgtttaaggaaccataaaccgtgtcatacatgtcagaacgcattacaccgtcgatcacaccggcaaggctggcattgatcgcaacagtagggccgcctgactgtgctaccatacagttttttggactcataagaaaactcctttgtgtttgatcttctttttgcaatgtctatcatacaaaaaaaggcacggttgcgcaatcattaaattaaatagaaagagtgatggtataccatgaaaatatgtacattgtgtcctagaatgtgcgctgtggaccgaaaatccggtgagcgcggcatctgcggacagaccacagagattaaggtggcgcgtgcggcactgcacttctgggaagaaccctgcatttccggggagatgggttccggtgcggtctttttttccggctgtgcactgcactgtgtgttctgccagaatgaaaatattgcaaatggcacggctggtaaggtgataagtacggagcggcttggcgaaatttttctggaactccaggaaaagggtgcaaataatatcaaccttgtgacaccggggcagtttgtaccacagatcataaaagcggtagagcttgcaagaaatcagaatttaaagatacccatcgtttataacaccagcagctatgaaaatgtggatacgatccgttctttagaaggaattgtggatatctatcttccggattttaagtattttgataccgctttgagtgcaaaatattcccatgcgccggattaccctgctgtggctaaggcggtgatagcggagatggtgcgtcagacgggtgcggcagtttttgaaaacggggaggattccctgatgaagcgtggtacgatcgtgcgccatctgatcctgccggggtgcacgaaagattccaaagcagttttgaaatatctgcatgaaacctatgagaatcaaatatatatcagtatcatgcaccagtttacaccgctctctaacgtgaaaaaatatccggaattaaaccgtaagatcacggatcgggaatatgatgaggttattgattttgcaatcgatatagggattgaaaacggttttatccaggagggggagacggcggaggagagttttattccggaatttgacaatgagggagtttgaggttgacgcattttcgaatatctcatataattccatagtaatgatggcaatagagggagtgtgaaacgaatgaagagaaaagtaagattcatagctgcacttttctgcatgggatgtcttgcgacagaacctgcggcagacataaaggctgccggaatccaggtggctgctgcacagacaacactttccgcagataattcgctggaagtgttatcactttctgcgggaacattatccccggactttacaggaaagacagtacaatatacagctaccgtaccgaatgatgtcacaagcgttacagtgacggcaacaccggttaatgaatttgcgacggtgcagtcgatcacaggaaatgacaatctgcaggtcggtacaaatacgataaaagtagtcgtgaaggcgcagaacggagcactcgcccagtatacgatcacactgaccagagaagatggacagacagcagacggaacagttgatcagccggcggatggaacagacggtcagacaacagaccagccggcagacggaacagacagtcagacaacagaccagccggcggatggaacagacggtcagacaacagaccagccggcggatggaacagatggacaggcagcagaccagaacgcagagtttgaaacagaagaagcggaagatgtttctaatatggaatatctccagcaggaatacaatgatctctctgaacaatatgcaaaagaaaagtctttttccagaaatatgatgggaattatggcttttgtgatcgcagtacttgtcgttattattatcaatcttctattgagaggacgtaagagtgacgactgggatgaggaagaggatgactgggactggaagtccgaaaaacagggaaaggatcaggaagcagaagatgatactgatctggaagaagatgataatatagaagagaatcctggcgtggaagaagatgatttggaagtagatgatccggaagacgctgactgggaggagaaagaaacacagagaaaaggatttttccacagaaaaccaaaagaaaaagtggaagaagagccggatgatgtggaagaaaacgatacagagaacgaagtcggcgtatcaaagatccataaagtgcgtgcgggattgtttggacgtggcatgtctgacgatcttgacgatgaggactgggaagaggacgaagatttcctgccggtagaaagaaaaaaaacggaagaaaaacagcgtccggagagaaaagaaaaaccggaggagaaacaaaggccggagagaaaagaaaaaccggaggaaaaacagcgcacggagagaaaagaaaaaccggaggagaaacaaaggccggagagaaaagaaaagccggagcggaaacatactccggagaaaaaacacattccgagagaagaagaggaagaagatgatttagagatcatcgatttaaatgatttataaatagaaaaagaatggagaaactatgcagatacgatatacatcaaaagcaaaaaaagcaatcgatcaggcttcaaagatgtcgaaatcactgcatcatcattatatcggaacggagcatatcctgatcggacttttaaaagaaggaacgggcgtcgctgcgcaggtattaaatgataatggagtagaacttgacaaagtcatgcagctgatcgaggaactcattgcaccggatgcacaggtgctgacggcagaggctaaggaatattcgccgagggcactgcaggtgttagaaggggcagcaagggaggcagcgcgttttcatgcagaggagatcgggacggagcatatcctgatcgcgatgatgaaagagacagagtgtgtggcatcccgccttttaaataccttagcggtcaatatccagaaaatgtatgtggatatcctgatcgcaatgggagaagatgcgagcctgtacaaagaagatttcatgaatggtaagccggtgaaaaaaacagcatcggatacaccggtattaaatcaatactccagagatctgactgcattggcggcagagggagtattagatccgttagtcggcagacaggaagagatcggccgtgtgatccagatcttaagcagaaggacaaagaataacccatgtctgatcggtgaaccgggcgttggaaagactgcgatcgttgagggaattgcggagcgtattacaaccggaatggttccggataccgttgcgggaaagcgggtggtatctttggatatgtccggaatcgtggcaggctcaaaatatcgcggtgagtttgaggagcgcattaaaaaggtacttcaggaagtacgggcagccggcaatatcctgctcttcatcgatgaactgcatacaatcatcggagcgggtggagcggaaggagcaatcgatgcttccaatatattaaaacctgcacttgcgcgtggggaactgcagctgatcggtgcaacgacaatcgatgaataccgcaaatatattgaaaaagatgctgcgctagagcgcagattccagccggttacggtagaagagccgtcggaagaggaggcagtgcagattttagagggactgcgggaacagtatgaaaagcatcatcaggtaaagattacggatgatgcggtatcggcagcagtacgcctgtctgcgcgctatatcaatgaccgtttcctgccggataaagcaatcgatctgatggatgaggctgcagcaaaggtacgtctgcgcgcgggtggaaaaccggaggaagtcgttgaattaagacatcgcatcaacctgttagaagaggaaatgttagaatttctgcacgatggtgatgtggaaggtgcaaagcagaagaagaacgaaaaagaagcgtgtgaagaagagcttgccaaaatacaggcaaagacaaagaaagacagccgcagtaaaaagttaaaagtgacagaagacgatattgcggatgtggtatccggatggacgaagatcccggtaagaaagattgccgagggggaggctgcccgcttaagaaaattagaggctaccttacacaaacgtgtcatcggtcaggaggatgcggtgagtgcagtggcaaaagctgtgcgaagaggacgtgtcggattaaaagatccgaggcgcccgatcggttctttcctgttcttaggcccgaccggtgtcggaaaaacagagatctcaaaggcacttgcggaggcagtgtttggcagcgaacagtctatgatccgtgttgatatgtcggaatatatggagaaacacagcgtatcaaagatgattggttcaccgccaggatatgtaggccatgaggagggcggacagctcagcgaaaaggtgcgcagaaatccgtattcggtgatcctgtttgatgagatcgaaaaggcgcatccggatgtatttaatattttactgcaggtgttagacgacggtcatatcacggattcccagggacgcaaagtggatttcaaaaatacgatcattattatgacgtcaaatgccggagcacaggcgatcattgagccgaaaaaacttggatttgcagtttcggatgatgaaaaacagaattatgaccgcatgaaaaacagcgtgatggaagaagtacgccgtatttttaaaccggaatttttaaaccgtattgatgagacgatcgtatttagagcgttaaacaaagacgatatgaaacagatcgttgcactgatgttaaaagaacttacagaccgctgtgaaaaacagatgggaatccaccttaccgtgcgtgacagcgtcaaaaagcatattgtcgataaagcgtatgatccgaaatatggtgcaagaccgctgcgccgtcagatccagaacgatatcgaggatgaactggcagaagaaatcctgtccggcaaagtgaaaaaagatatggaagtggtcgtgacgatccacaaagaaaaagtcgtgttcgaaacaaaataaaattttactgaaatatccgggaaagcactggaaatcgtgacggggatattatataataagggcacaaaattttacgataaagagaaaactactttatcacaggaggaaaaaatggcaacgatcagcgaattaattcgttcagaagcagatggaacgatcagttttggggattacacattaggtgcaaaggcgaaacttgataatttcgaacatcagggagatatctacaaggtgaagacattttccgagatcaccaagttagagcgcaatggcatgttcgtatatgaatctgttccgggaacggctgtcatgaatctgaatgcaacagatacaggcctgacatttcaggtagagggaccggaagatgcacagatcacagtagaacttgaggatgagtcagagtacgacatcacgatcgatggcgcagatgcaggaaagatgaagacaaatcttggcggcaaattaagcttaagtgtagaacttggcgaccatccggtagatgtaaaagttacaaagtgttaagaacggaaaagtgagatcaaaggaagcttacatgtcaaaagggcatgtaagctttttttgcgctttcaagtacgaaagtacgattgacggggataaactgttacattaacataaaaaatgcgcgtgacaatgtgcaataaatcagaaggagaaaagttatgaaaagaaagagactcacgggttggaaacgtatggcggcatttgcgatggcgcttacgctgacggtcggagattggacatcagtaggtgctgctggattgccgcagacagatgtacagacagtaacagaggctgtgatacaggaagaagatgcgatggaagcagctttagcaacagaacagacagagacagaaagcgaaacggacagtgagtctgcagaaaatgacagtgggcagacagagaacagcgaggcatcggaaattccagaaacatcagaggcatcagaaactgagaaaactgtagaagagacagaaaacgtgaatgatacggaggctgttgatgataccgaagtgatggaaacagagacggaagaagaatcggaagaagaaatagaagaagagaccgaagaagagactgaagaggaagaactcgctgcaattgataaaccgtcaaaggtaatcaatgtaagaggaaaagatgacggaagtattataacaacagcgtctggccggcagttgagatatgcttatgtgaatcggttccagaacggagtgattgcagcaggtacgacagacgaaattgcaggttttaagattacaaaaaggagcaatttttgggataagaccgtaggattatacaagtatgaaaataactattatggtcagtgcagcggtacggatattgatggatttgtaaacctgtataataaggcagaagccatactgaaaggcaacacagataaatatcaagatgcatatggaatgtatagagtcaatggtaagacgtatagagcattgcggtcatgtgatgcgacagggtatcattatgtgacagaaggtgatgaaattacagaaattactgtaagtgattcatcggaaaatgccaaaaagcggatagatgagtatgcagtaaaaaatgatacacaggttctttattatagttataatggacatttttataagcaattaacgtatgaatcggtatatgattcagcatcgaaaaaatataaatatgttgtatatgcaaatgcttatgaagagatttcttttgaaaaaacttatgtaaaaataagctggaatccggttaataatgatacggccacaatgaaaaataaagccggagacatgatgaaggttggatatgaagtggtctgcgatggaaataccaaggtctataatatgccgggattatttttggatgcgtcagacggaaccgtacatgagatgataacatcagatgcagcaagactgccatatgtcatattgaattcaggacagcaggtcagcgtaaaagtccgtgctgtatattatcatgaagtgacaagtaacaaacaggaggtatattggaactggaatgataatagccaatatattatagaatcgaaacagacgaaatatgtggtggacatgtatggtaaatggtcggacacctatacttataaaaattactctttaaagaagttatcaccggtaaccggtacaaaagtttctgaaaagggaaaagagatgtcagttacctggaatgcacaaaacggagtggatagctatcgtgtgtattacctgcgaagcagcaaaccgttaaatattacgaatatagagagctttttacagttttacaataagaggggaacgctgtacgatgcttatgtaaatgcaaaaggagaaaacgattcctatgaaacggattcagagtatgcatcagatccgtattgtaatattacaatagattcaggactgccatatttttattgttccgtcagactggaatctgcggaagaaggatatttttcagatggaagttattcagatgtcataactgcaacggccagcattaatggaaacataccgacagtaaaaaatctcaaaatagaaaagacgtacaatggagatgactggcagctctcatggacgccaatcgatgcggatgtagtcatttatgtttttgaagaaggaaagaagccggcgcattataattatgagcttttgaacgcttatggttactatacggatggtcagggacagcagaaaaaactttatttaaaagatgcacttacggagcttgaaagtaaggaaataagcagttatgtacgttcttacaaagtgaagggaatcgatggatcatacagtgcaatctctttaaaaccgggcgtaaaatatacatttgttgcgcatacctatgatgcaggcagttctctttataacatacaaaagaagccggtgtttactgtaaataaggaaataaaagtaacagatgctcaaaaaaatcaaacatataaaaatatatctgttggcatgacttattatacggcaatgagtcctgcttcgaatatggtaagctatacggataaggtatccgtaccgcgtgtatatacaaaggcgggaaaaaacagtataaagttatcttttaccagaggaagctgtaccggatatgagatttatcgtctttcaggtaaaaaatataagaaaatagcaacgaccacagactatgtctatacagatcagaatttaaaggcaggcacaaaatactcctacaaggtacgctcttattattatgatccggacagaaaaacgaaaagttacagtatatataaaaattttactgtaagtaccagccgtgtaaataacattgtattaaaggtggctaagaactcaaaaaatacagtgaaactgacctggacaaaagtaggttttgcaacaaaatatgagatttacagaacttctgagagtgacaagaatatcacagaaatttcaggatggatcaattcgggcaacagtgccgtaacagtagaaaatacaaagtatgaactggtgaaaacgatcacaaacgcaaaaacgacaacatacacggacaaaaagttaaaattcggtgagagttacacctatctgatctgtgcatattataaagacggaaaaacattaaaatacattaccgcgtcgaccagagttaaaatgcagctcgaggagccgcgaaatctcgtccttaccaataaaggcaaaaatgtaagcgttaaatgggatgcggacaagtacgctgcaggctatcagatccgatacatggtatatgataaatatggtgagaaaaaaacagttgcagaaaaatatgtaacggtaaagaaaaataaatacaccattaaaggattatcgagcggagaatacgtcaatgtatcggtaagggcttataattcccaaaaagaatacagtggatggtcatcgtcaaaagaatctacatcacttgcagcagtaaaatccatcaaagctgtttatgatacgaaaaagaatgcagtaaagattacctggaaaaaggtaaaaggtgcgaaatattataaagtcgtccgttctgtatatacgccgttatgtaatacggacgaaaaactttatgcagcaacaggtaacctgatcgcaaaagattccaatgatgagacaggatattacagtgaggttcactatcgggaatattatggcgaagacggatccattacaggcacggcggcatatgacagggcacggttgaaaaaaggtgtgaaatattattatatggtcagtgcatatggggaaaaaggaacaagaattgcctcttatatgacctcggaatatggtacacaggttgcttccggtaagccggcagtcatcatatatggtgtcaaagttgctgcaaaagtaaaaaataacaaaaaaggaacggttaccgtttcttacaataaggtaacaggtgccaaaacttatcagatttaccgtgcagaaaaaaagaacggtaagtatactctgattggaaccacaaagaagatgtcttttgcagataaaaaagcaaagaagaaaaaaacatattattacaaagtggtcgtaaatggcaggaatgaattacttgcagactttacaatcaggagttcagcagtgaaaattaaagtaaaaaaataattctgcaataataataaaaaccggaagaagcggattgctttttccggtttttgtcatagaaagtaagttgctttttacagataaagtaagtatactgataaacaataaaaagagatggagaaggaatatgccgaagggaaaaacaacagtatttttttgtcaggaatgtggttacgaatcatcaaagtggatgggacagtgtcctgcatgtaaggaatggaatacatttgttgaggagatgatcgataaaaaaagtgcagcaaaaggcggcagggtagcggcaaaagcggcagaggcgaagaacgttccgctctcacagatcgagatgacacaggacaaacgcatgtcgacggatatgaaagagcttgaccgtgtacttggcggcggaatcgtacagggatctttagtgttagtgggcggtgatccgggaatcggtaaatcaacactgcttttgcaggtatgccggaatttatcggagaaaggtgtgcgcgtattatatatatccggagaggaatccctgcagcagatcaaaataagggcagaacgtatcggaacctttggcgattcgctgacacttttatgtgaaacgaacttagacacgataaaaacggtgattgaccgggaaaaaccgcagatcgtgatcatagattccatacagaccatgtataacgaagaagtttcctctgcaccgggcagcgtatcacaggtgcgggaatccacaggggtatttatgcagatcgcaaaggggatgggaatttccatctttattgtcggtcatgtgacgaaagagggcgtggttgcgggtccgagagttttagaacacatggtggatacggtactctattttgagggggacaggcatgcggcataccgtatactgcgcggtgtcaaaaacaggttcggctcaacgaatgagattggcgtgtttgagatgagacagaacggactgatggaagtggaaaatccttcggaatacatgctgagcgggaaaccggaaggtgcatccggttcggttgttgcgtgttctatggaaggaaccagaccgattctggtggaagtacaggcgttggtctgccacagtaattttggaatcccgcggagaacggctgcaggcaccgattttaacagggtaaatcttctgatggcagtacttgaaaaaaggctgggattaaaacttggagactgtgacgcttatgtgaatatcgcgggcggcgtaaaaatgaatgagccagcgatcgatcttggcattgtgcttgccattatatccagttaccgtgaaaacccgatcaatgagaagacgatctgtttcggagaagtgggcttaagcggagaagtgcgtgccgtcagtatggcagagcagcgcgtgacagaagcaaaaaaacttggatttgatgaatgcattctgccacaggtcagcctggattccatgaaggacagtggatctgtgccaaagggaatccgcctgactggtgtgaggtcagtgaaagatgcgatggatgcgatattgaaataaaatacggtggaaatatatcttttctggaaagatgaactgaaacagtaaaattcactttgcgaaagtacacataagaaagtgaaatttttggaaaaaatgggttgacaaaataatacccagatggtaacatagtcaagctgaccgcgggacatgacatgatctgacagcgggcaacaaaaaagttgttgacaaacagaacaacacatgataggatatcagagttgtcgcatttgagataacagatcggacaaaaccgattgaaagaaaaagtttcaaaaatggaaaaaagttcttgacaaaacagacttgataagatataataaacaagctgtcgctgagaacgacaacaaaacaaagaaccttgataactgaacagtgaaataaccttgaaagattcaatgaatttcagggtgttgtgaataacaacacacg

SEQ ID NO: 5155 - DNA, 26498 bp, Unknown
  gut microbiota DNA sequence
ccgtccctgcttagagtgtactgcacgggtttacaacattaattatggacacaatcaggaattaatggcacgatgccggactttagaggaatattctatcctgattggcagaatttcttcgaaggtcagaaacggtattccattagaaccggcagcggatgctgctgtacaggaatgtatcagggacggtattttgcaggattttctcaccaaacacagatcggaggtcgttggtatgttattggaagaattcgatatggatgagtatattaagatggaacgcagggacagctatgcggatggacatgaggatggcttagcgatgggtttagcggagggcaaacgtcttgagcaattacacatcatccacaacatgttccaggaaaatattcctgcacaaagctgtgctaaactgcttaacaaggatactgcttttattgataaagtatattcactgtgccaggctcaccctgactggtcagatgaagatctttacaattcactaaaagaaaattaaactcattatttcaaacaacagactacacactccacgcatattctattttcaaaaacacctgtaattacatgcccaacaacatataattacaggtgtttttattactgaaatatttcttttttacagatcacataggaaatccctgccacgaccacttccgtgatccagaacgcatgccagacgcccgcagcccccaatattttactcaaaataaatgccaatggtaaaataactgctatgtacctgagcacagaaattaccaacgattcttttccctttcccagtccttccaacgcacctgataccgtgacggagaccgatgacgcaataaatccaatgctgatcagacgaagcgcctcttttccaaattgtatcgtctccggattactggtaaacaatccaatgagcgtctgcggcactgccatacaaagtatcgttccgattaccatgacccccgcgatcaataccagcgctgaccggaaaatttctctgacacgctttgactctcccgcaccgtagttatatccgatcagaggacgcatcccctgcacgacaccatttcctgtcagatataaaaatgtctgtaatttaaaataagccccaagtacaagtacatagctggcagaataaaccgcaagaatcgcatttaatgcagagacctgtacagacggcagtgcgatgctcaatgttgccgggacaccgatcgaatacattttcctgctaagttccgcttccggtttcatatctttccatcttatctttaccggaatcggtttaaaaaaataaaacagcagatagctgacaagagaagccatctgaccgatcccggttgcgatagcagctccccggatccccatttcaggaaagaaaccaattccaaatatcataaaaggatctaagataatattggtcacacagccgatcagcatacaaagcatggacgttttcatgcgccctgccgactgaaaaatcttttcaaaacaaagacctgccgcattgggtactgcaaaaagaaatacgatctgcgcatatgccgcgcccatgtctatgatcgaccttttatctgtaaacattgcaagaaaaggtgctgcggctgcaatacagactaccgctaagatcagtccgtggatcatattaaaaagtgttcccagcgacgctgctttatccgccgtgttctgcttttgtgctccaagaaaatatgcgattgtcgcattgattccgattgcaaatccgataacaactgcattgaccagattctgcaatgggaacaccaaagaaagtgccgtcatcgcatcttcgctgatgcgcgccacaaaataactgtcaatgatattgtagagcgcattgactaacatggaaaatgtcattggcaatgccatggagatcacaagcggcatgaccggtttttctttcataaaattctggttcatttttcattcctttcgtttcatgacatgaggacacatcgtggtttcagacttcttaattggcagattccacaaaaccgtgactgcttatgtgcaatctgacaacaaaaaaacgccacacagttgcaaatcattgcagctgtgtggcgaaaaatagagttcatcactcaagaaaagtccactccataaaatggttttggaactatattataaccagtaaattttatttctgtcaagtaaatcttattttgcaatatcaatacgcaccagtgctttgcgaagtgcaaattcagcacgtttgacatcgattgcctctgtccggtgggcaagccgttcctcagcgcgcgcacgcgcagcttcagcacggttcttgtcgatctcattcggccactctgcaatctctgcgagaagtgttaccttatccggcagaatttccgcaaagccggaatgtactgccgcgatcacgtcatcttcacccgtcttgtggatctttacgatgccgggtgctaacacggtcgtgagcggaatatgctttttatacacaccgatctcaccggaggcagtggtaaactcgatcatatcaccctcacctgtataaaaaacacgatccggcgtaatgatctctacctgaaagagtctgttttcttctgccatacacaccctccattattactgcatctttgcgcggacatcatcgatcgtacctgcatttaagaaataactctccggtacatcatcatgctttccttcaagaatctccttaaatccgcggattgtctctgcaatcggaacatattttccatccagaccggtaaactgtgttgcaacgaagaacggctgggataagaatctctgtacctttcttgcacggcttacaaccagtttatcatcctcggaaagctcgtccataccaaggattgcaatgatatcctgcaattctttgtatttctgtaagatctcctgcacaccgcgggctacctcaaagtgctcctggccaacgatacgcgggtctaagatacgggaagtagaaccaagcggatccactgccggataaataccgagttctgcgatagaacgctcaagtacggtcgttgcatccaggtgtgcgaatgtggttgccggagccgggtctgtcaagtcatccgcaggcacataaaccgcctgaacggaagtgatagaaccgttctttgtagatgtgatacgctcctgcagagcacccatctctgtctgtaatgtcggctggtaacctacggcggaaggcatacgtcctaacagcgcggatacctcagatcctgcctgtgtaaaacggaaaatattgtcaatgaagagcaatacatccttaccgcctttatcacggaaatactctgccatcgtaagacctgttaaggcaacacgcatacgtgctcctggcggctcgttcatctgtccgaacaccatggtggtcttatcgataactcctgattctttcatttcatagtaaaggtcatttccctcacgggtacgctcaccaacgccggtaaatacggaatatccaccgtgctcggttgcgatattgtggatcagctcctggattaaaacggttttacctacaccggcaccaccgaacaatccgatcttaccacctttctggtaagggcagagaagatctacgaccttgatacctgtctctaacatctcctgggatgttgcctgttcctcaaatgcaggagcaggtctgtggatcggccatttttccacgccggccggaggatcgatctcgtcgatcggatctcctaatacattaaacattctgcccaatgtattctcacctaccggcacactgatcggtccgccggctgcaactgcatccatgccgcggactaatccatcggttgatcccattgcgatacatctgactgtatcatcgcccagatgctgggaaacctcaacggtcaattcttttcccgcctgatcgcctcttaacgggatacgaatcgcatcgttgatctccggcagattgccctctgtgaatttaatatccagaacggcaccgataatctgggtaatcttaccgatattatttgccatcgcttctttctccttgtaatcaaattttgtgctgctgtctttttattcgattgcagattacctgcagcttcatctgcttatccagagattgccgacgcaccggcaatgatctctgttaattcctgtgtaatcgagccctgacgtgcccggttatatttgagcgtcagatcactgatcatatcctctgcattgctcgttgcagaatccatcgcctgcattctcgcaccgttttcactggcaactgcctccacgagtgcaccataaaacaggcttgtaacgtattttggaatgatcatatcaagtgcttctgtctcattcggctcataattcatcagaacgtttgcctctgctgctgcaccaagttcttcttcatcaaactcgatcggtaacagcttcatcagcttcggttcgtgtacgactgtatttttaaaatgtgtatacaccagataaatctcgccgatcgtgccattggtgtaatccgcaagcacctttttgcagagttctgccgcatcatcataagacggggactcaatgatataggagtcatcctctttgatatgatagccgcggcgttctaatacctcgcgtccctttccaccgatggcatagatctctacatcatctttggaaaagtcacttcccgtaaccagcttgatcaggttggagttgtatccaccggcaagtccacggttggatgtgatcacaacgatcgctttctttgtggaagtaccttttttcagatatggatgatcgatcccacctgatcttgcaagcatggaagtaacggtctggtacatatagttcgaatatggattcgtctgttctgccctgctttttgctttctgcagttttacggttgaaacaagcttcatggcttttgtgatctgctgcgtactctgtatgctgctttttcttcgtttaatgtccctcattgaggccataacaacttcctcctttttttggcgaagtcctgcttgttacgcttatttcaagaaatctgccttacattcttcgattgctttgacgagttttgcctcggtctcatcactgatgactttctctgtgcggattgcttccggtacatccggatatttggtatccacatactcaaacagtgctttttcaaacggtaaaacctgttctacaggaatatccagaagatattttcttgtcgcagcatagatgatgatgacctgtttttcaaccggcatcggctgatactgcggctgttttaacatttcacggattctggcaccctgtgctaacttctctgtcgtatcggcatcgagctcagaaccaaactgtgcaaatgctgcaagctctctgtactgtgccagctcgacacggatcggtgctgcaatcttcttcatagccttgatctgtgcggaaccacctacacgggataccgaaagacccgcattgatcgccggacggaaaccggagttaaacatctctgtctcaagatagatctgaccatcggtgatagagataacgtttgtcgggatatatgccgaaacgtcaccagcctgtgtctcgatgatcggcagtgcagtcagggaacctccgccaagtttgtcggaaagtcttgccgcacgctctaagagtcttgagtgcaggtagaatacatctcccggataagcctcacgtcctggtggacgttttaagagcaaggagagtgtacggtatgcggctgcgtgcttacttaaatcatcgtaaacaacgagaacatcttctccgttctccatccattcctcaccgatcgcacatcctgcatacggtgcaatatactgtaatggtgcaagctcacttgcagtggaagcaaccactgtcgtgtaggacattgccccaaattcttccaatgtttttaccagagcggcaactgtggaagccttctgtccgatggcaacgtaaatacattttacgccctgtcccttctggttgatgatcgtatcgatcgcaatcgctgtcttaccggtctgtctgtcaccgatgatcagctcacgctgtccacgtccgatcggcaccatggaatcgattgccttgataccggtctgtaacggtgtatctacggattttctggaaataacacccgatgcgacacgctcgatctgacgatatttgttcgtctcgatcggtcctttgccgtcgatcggctgtcctaacgcattgacaactcgtcctaacatggcgtcaccgaccggaacctctactactcgtccggtggtctttacggtatcaccctcgttgacattgcgctgcgcacctaaaagtacggcaccgacattgtcttcctcaaggtttaataccattccatatacttctcccggaaattccagaagctcgccctgcattgcgttgtcaagaccgtgaatacgtgcgataccatctgctacctgaataacggtaccaacgtcagctacctctaactgcgctgcataccttttgatctgttctttaattacggaacttatttcttctggtcttaaattcatgaagcgcattcacctgctttcaactgtatttttgacaattcgcgtgtcagatcatttaatttggtccggacactggaatcaacgactctgtcgccgatgcgaatcaccattccgcctatcagtgcggaatccactgcataatgcatctcaaatttcacatactttgtagtctctaacaatcttttctccactgctgctttctgcgcttcggataattccattgccgatgtcacataagcggttccgatgttcttatactccttgacacagtcaatgaaataatccagcaccgtatccacttttgcgaaatgacctttttctacaatcaggcggagcagtccaacaaactccgcggaaatcttttctgcaaatatgtcttctacgatttttactttttcttctttaacgatttttggatgactcattaatttgaagagctcaggattctcattcaaagcagcttttactgccactgcctcatcccggaattcatccatccttccgctctctagcgcaacttcaaacaatgcatcaccgtatgtttttgatactagctttgccatgtcgaatcacccatttctttcaatgtttcttctaccagcgtatcctgcacggtcgcatcgatatttgctgcaacaacttttgccgccatcatggatgcaactgtgatcatttcctgttttacttcatccattgcacgcttcttagaaagctctgcttcttcgttggctctctttatgatgcgcgccgcttcttcttttgcgtcactctcaatgcgggctgcatttttctgcgccgtcttgcgggcctcgcttaagatctgctctgcctctttatcgacttcttttaacttcgcatcatattctgctttgagtgctgctgcgtcctgtttgtccgtttctgcagtcttaatatcggctgcgatacggttctttctgtcattcagcagcttacgtgccggttcaaacagcatcttggacatgaataaaaataagaaaaatactgctaacgccatcaaaaccacatcatgcagtaactgaaaatccagtccaaaaagtcttgtcatttcctccaaggttcggcctcctttccaatttttttattccaagaatggagcgccattcattagcctaaaggctgtacgaacagtaagagcattgcgatcaagagtccgtaaagacctgttgtctctgcaactgcctgtcctaaaagcatggttgacatgatatctccttttgcacccggattgcgtccaactgctgctgcaccatgtcctgctgcgataccctgtccaataccaggtccgataccggcgataactgccagacctgcaccgatagctgaacatgccataattaaatcgtgtcctgtgatattcatattaatcctccttgttttgcgaagcaaaatccgaaccctctggtgaggagaggatttgcctccttgttttgcgaagcaaaatccgaaccctctggtgaggagaggattttactcctaaatattattattcttgttcgtagttctgaccaatgtatgtcattgtcaacatacagaatacatacgtctgaattgctcctgagaacaagtcaaagtatacatggagtgctgccggccagatgattgctattttgctcagcagtccataaaccagtgccatcataacggttcctgacaatacgttcgcaaaaagacgaagcgacaatgaaatcggcactgcgatctcactgatcacattaatcggaaaccagattggcagccatggcggcaatggggaacacatatctgtccagatctgcctgatcggcagattcttaaactgcgtgatatggatcaggaagaatgtaataagaccaagtgccagtgtcgtaccatagtcagccgttggtggtcttaatccaaacagacctgagatattactcataagaataaagataaaaatggtactgatatagttgacaaacttcggtgctgccacttttcccatggtgccgtttaccatgttatccagcatttctaccatcagctcgataacattctgaaatcccccggggatctcctttgcatgtttgatcgcccggtttcctgcaatggcaagcgccatcataagaagcataacaatcaatatgcagacatgtgatgtcgtgatccagactttgtgtccgaagatctcatactgaacgataccatgtatcataaagtcgatgttttcggctccggatgacatcagaattgcgtgattcactctctcacctccctcatatgaaattattatcttcactgtctgaagatacatcacctcttccttgcagtttttgtattactctatgtgtaaagggctgtaagtacgcagataccttaagtcccaataccccgataaatgcagtgatcagatttcccagattccatttcatcataacaaagaaaacgatcacaacgacagcatagcggagcagcgattttgcaacgatcttcttctttgcattgtcctcgccgtacagttccaccgcatctcttaacacggtcgcaatgttgactgccataccgcacgctaagctgataccgatcagaagtcctgtggtgtacctgactttatctgtgacaaaccagacacccgccagttccacgatcactccatacacaataattcccaaaacaagtcccggcaatgcatcattgatccttcgtaacattttttctgccaccgtcctgtccgtaaatcttttttgccattttaaaaatgttggtaaatcccgccagggctcccatgataaacagcgggatcacgatccagagcatatcatatttcctgccgatccatgtaccaaacagagtgcacatcacgatcggaacgatcatattcagtccaaactgcaggatcagtgtcagtgcctgaaatacctttctgttttttctcacttacatcgttcctccataaagtacaatctttattcattataacatttttcgccattttgtccatcaaatatccgtcattttgtatagataatatttcctttttactaataaatattttaatttttacatgctctttacagctaacttctactccgcgagatgcgcatcccgcccggagggctttttaattcataggacgtaatttcctatgaattaaaaaaagcatgtatgccagatttctgtatacatgctctttttattcatgataatagaatgttcacggactgagcattctattatttatcatcttctataattccagttctatcctgcggtttgtatgttcatagcgctgcagcacgaccccagccgcattcagcatctttttggatgccacaactgccggtgttgtctcatatttgtcgctgtcatacacgatcctgcggattcccgactgaatgatcgcttttgcacattcattgcagggaaacagcgtaacatagatcgttgcgccctccaagcttcctccgcggtaatttaagatcgcattgagttcgctgtgcgttgtataaaaatatttattttctaaaggctctccctcccgctcccacgggaattcatcatccgagcagccagtcggaaatccgttataccccatcgagagtatcttgtgatcttcgctgacaatgcaggcacccacctgcgtattcggatcttttgaacgcattcccgaaagtactgcaactcccataaaatattcatcccagctgatataatctttccgtttgccgctcatgccaacctccaaagctttccgtaacctgtactgttattttgttccaaaaatacggtctccggcgtctccaaggcccggtacaatataaccatgctcattcaaatggtcatccaaagccccgatatatacatctacatccggatgatcctcctgcatttttttcacaccttccggtgctgcaataatgcacatcagacggatatttttaactcctttgtcctttaacatctggatggctgccgaggaagaacctccggttgccagcatcggatctaccacaaacacctctctgtttgcacaatctgccggaagtttacagtaatactctaccggctctaatgtctccggatcacgataaagtccgatatgtccgacttttgctgcaggaatcattgccagcataccatccaccatgccaagaccggcacgtaaaatcggtacaacagcaagctttttgccctttaactctttcacagtcgttttgcagatcggtgtatcgatctccacatctgcaagtttcaagtctctggttgcctcataacacatcagcattgcaatctcgctgactaatgtacggaaatcttttgatccggtttcttctctgcggatgataccgattttgtgctggatcaacggatgatccattactacaatttttcccattttaattttcctcgcttccttcgttactttcttcatttaaaagagtgaccagctttttgatggtttttctcattgtttcatagcatagcccatatgcctgcagactgccgccatacggatctaaaatctccagttcatctccgacaagttccgtgagaacatatacattctccgggttggctctctcgtatttttccagaaccttttccaactgggcgtgttccataacaagaactaatgtgtcctctgtaaaatcctcctccgtcagctgcgctgacatatagctttccagattgatgccattgctgatcatgactgcttctgccttctgattgagcggctccgggaataaaacgatcattcctcttgccccaatctcaaccggatgttttaatacatactccccaagtatgcctgctgccatcggcgcgcggcatgttccgttctccgcgacaaacaggattcgattatattgtttcatgcgttatccttccttctcccatcaaacatgaatcacctgatgtcctgctgctttcattaaccggttcatgattgcctgaccgatcctcggtgttgaaaaactctctgaataaatcgcatctacattccaatcatcaaattcacgcaatattttgtacaaatgtctggcaatggcatcctcatcgcttctcgctccgatcgtcaccacataatctgcctgatacaaagactccgtctcatccgttgcaacaacaccgaccttaagtcctgccgcctgtttttccctgaccagcgcattgatctctgcaacaacagcctcctgctctccctcaaccagtaccagatccgccttcggcgcatagtgtttatacttcattccgggcgctttcggcttctttgtggaatccgacgcaatgatgcccggatcaatgcgtacctcttccccgagcacttcctctaacatttcttttgtaatataacccgggcgcagtatcatcggtactttttccgtcagatcaatgatcgtagattcgatgccgattccaaccgaccccccatccagtatcatcggtatcttaccatccagatctaacgccacatgtcccgcttctgtcgggcttggttttccggaagtattcgcactcggtgccgcgatcatacagccgctctcatcgatcagtgcaagcgcaaccggatgattcggcatacggatcgccaccgtatccattccaccggtcgtttcatacggaaccttttcattcttccacacaatcatggtaagcggtcccggccagaacgcgtctgccagtttctttgcctgcggcggaacctcttttgcaatggataaaagttcttcaaatctgcatatatgaacaatcaacggattgtccgaaggacgtccctttgccgcatagatccgttttgacgcctccggatcaagtgcatttgccccgagtccgtaaaccgtttcggtcggaaatgctaccagcccgccggatcttatgatctctgccgcctcccgcatatcctccttattcggatcgtctgcgtctatttttattaattttgtctgcatatatcactacttcttttctaatataattcttatttttatttttcccaaacatttgtattatcgcacattttatccaaataggcaacagagtgtgcataattcgcggatttgtaccttgattttccagcaaaattaccatagaacccgaactgtaacttgctatgtttccgtaaatgtggcataattattactgttcatctgcaaacagttatgtttggaaaggggttttcatgaaaattacaaaatctgatttcggtacaactaacacaggagaaaatattaatatataccatcttgaaaatgaggctggtgcctatgtagaaattcttaacttcggatgccgccttgtaaagatcgtcgttccggaccgcaatggcaatccaacggatgtctgccttggcatggacaccatgtccgcctatgaaaatgacgatgcaagccttggcgccgttgtcggacgtgttgcaaaccgcatcaaagacggtcattttactttaaatgggaaagaataccagcttgccgtaaactgtggaaccaatcatcttcatggaggtctgatcggttatgcctccaaaccatgggatgcaaaagtcaaagatgataaactgatccttactatggtttccgccgatggcgaggaaggttatccgggcaatctgactctgaccgtcacctacggctggtccgaggacaatgagctctcgatcgtatacgaagcttccgcagatcaggacaccctgcttaacgtcacaaaccacggttattttaacttaaacggtgagggaagcggtgatattctttctcacgaactgtatatcgatgcagattctgtcacagaactcgacgattcgcaggcgcctaccggaaaactgatcccggtcgacaatacaccgtttgatttcagagtgatgcacacgattggcaaatcctactactcagactatgaccagctgcacaaattcggcacctacgaccacaactttgtgatcaacggaaccggtcttcgcgaagcagctgtactacagtccaaagaaagcggtatccggatgacctgctttaccgatcagccgggcatgcagctttatgttgccagccagccgatgaaacagccgggcaaaaacggtaaaatctatgacagccgcaccagcgtctgcttagagacacagcatttcccggacgcgatcaaccacgacaacttcccaagtatcgtgttacatccggatgcaccgttccattccaagacgctgtatcatttttctacattctgataaaaataattggtcgaaagagccgcatgtaccgtttgtgtatatccggctctattttgctatcacattcctttgtgcttatttttgtacacggttttttcgtgttttgacttgtattaccctcttttttgtattagaataatctaaagctactgaagcggtagcgagtctatgattctattttaaggagggaatacaaatggcattcgtaatttctgattcttgcgtaagctgtggtacatgcgagccagagtgtccagtaggagctatttctcagggagacagccagttcgtaatcgacgcaggcgcttgtgtaagctgtggtacatgtgcaggggtttgcccaacaggagctatcagcgaggaataatacttaaagagttttttgcgagtaaaactcttgcgggaaaccgcaaaaagaagctgtgaaactatgtttcacagcttcttttttacttagacaagtccacttagatcaatctcatagatcatcttttccggttccctttcctgtttataaaacaggatcatataccatggtaaatacaggatttccccatcttcctccacattcgattttgaaaatacaatatttttttcaaacttccattgttctactttcattgcatgatccattgccagatgctttttgaagtcatttcctgacttaatctctacaagttctgtgtgaagtcctttttgtaatacaaaatctaattctccaattttcttagaatcataataatgaagttcaaaaccgttcgatttcagattttgcgcaaatgcattttccagaatacttcccatattgacgtcaacattccccatcagaagatcaaactggatattttccatacaggaagcacaaagcagtccaacatcattcatataaagtttgaacaggtttcgtttttcacttaactgcagcggtgcctgtggttctgtcacgttataacatggtaacgcaacgcccgcatccgctaaccagttaaagctgtcctcatacctgatatgccttgcggaagcgttaatactgtttaatttaaatctccggttcttctcatttaactgcgcaggaatgctgtcaaatattgccttgatttttacttttttattttccgacgcatatttcgctatatccaggcggtaaagatctaaaatacttctctgattcagcaccacttttgcaatatcatgcgtatcaacataaatctgtacggtttctggcattcctccaactacaagataactgtaaaaaagtttgcaaagtgtctcatgtactgtctcagatactttttcctttttgtcataacacgatttcaaatactgcagtgtatgattctgtatgccattcgcccacaaatattcctcaaaatccagcggatacattggtaaaatctgttcaaagccaaccggataagatgtgacatccttgtaccgcacaccaagcagcgagccggattctatataatcaaatcttccatcctctaccagaaatttgatcgcagaccgtacccttggacattcctgaacttcatcaaataaaatcagtgtctttcccggttctaacggtgtctgaagatatgctgtcaggtttgtaataacagcctctgctgtcagctttccattaaaaatatctgcagcccgctcgtctgtcacaaaattcagttctgcgaaatattcatactcatttttcccaaactcacgaattaatgttgtttttcctatctgtcttgcccctataatacacaaagcctttccattggcttcctttttccattttagaagatcctcatacacttttcttttcagcatttccatcctccaatattaggatttccaactctctgctcttatattaacattttttctttgtttttcaatgtatattgtaacatttttcagtacatttttctttaatttttatatgatatctgtaacattttttaatacatttttcttttattttcagatagtatctgtaacattttccagaaaatgatccacatctttgctgctgtcaagaaaatcagacggttacataaactatgctgcacaaattatatgatgcgcaaacggtgcaaatcagttataatagtcatgaataataaaaatttaaaaatggagtgttattgattcgatgtgtcaattagacccggcaataaaaaaagatattatagcctgctgtaaaaaatataatgcaaataaagtcattctatttggctcccgtgccagaggagataacggaccttacagtgatatcgaccttgcaattaaaggagctgataactttgaccgtttatttgccgaattaaaatacaatgaatttacgctgcttgacatggatattattgatctggacggcagggtaagtgaacctttgatgaaagatattttaaatgacggacatattttatatgagaggacaggaaaatgaaccgaaaaattgaaaactttttttcaagccttgatactttacatgaagcttccgttactgactatactcaaaacaaaattgttttaagcggttgtgtcaacaccttctgcctgacttttgaattatcgtggaaagcaatgaaatacgttttggagtcagaaggtgtcgataaaggcagaaccggttctccaaaattgattcttatggctgcccttacgcgtggattgatcgaagatgaaaatgcatggcttcgcatgttacggctccggaatgacgaatcacatcattataatcaggaatgtgccattgaactgtgccgcatgattccggagcttcttccttattttgatgatctgaaggagaaaattattgcattcgggtacggagaataatacaaaacgctattgcaccagaatcacactctaatgcaatagcgtttttttatgccctttcttttttgtttctgccccatctttttttgggttctttctttttcaggttgccgcggattgccgcatccagtttccggaagcgttcctcgtccgcctcatcctgttctctcatgagataattcatttccttgatgacctgctcccccacatcttcgctgatacagcggcttaattcctgattatttgcggcaatcgctgttccgacgatctgcgtcatcagctcggtaaactgtgccatcttgtcggtattgtcaaggacactctggctctcattctgtgcagaccgtggtgtattctgtcccgccgccactggcagatccgcttttactgcatatccatccggaatatgtgaaacctgtgcacccggctgttgctccggttttatgactttttcattcgaagtgcatgtgacctggtgcagatcctgtttttctcccggatgcaccgcgccaacttccgcctgcgcatcgggtgacatattatgtacgatcatacggatcgctttcaactgatatccctgttcttttaattccttgatcctctggaactcctgaatgttttcctttgtgtaataccggtgcccaagttcatttcgcggaacattaagctccagttcatcctcccagtaacgcaatacatgtgactctacatttacaatattcgcagcgtcggaaatcatgtaacgtaccttttccattccggttcctctccttcctttcacctgctaacctatattataagcatttaaaaggaagcctacaacgaaaatcgctcgtcttattccgacaggaaccgcgaaatattcgctgttggcagtaaaaggtgtgtcaaaatgcagcgactggtaaattgcacaaagcgtaaaattcttttgtgactttggtagaaaattagaaaaacttagtatgcctgttctaagctcagtgttttgctgccacggatggcagcaaaagtcttaacgcgccacggatggtgcgtttaagacgtacacgtcactctgtgaacacacctcgcaggcatacttagcttttcttattttcggacattggaacaaaacggatatacgccttgtgcaattttccactcaaaaatttagctacaccttttactgccaacagcaaaatgctcaggttaacctgagcatttcttattatttttccatattcgcaaacttcgtgtactgcggcagccataccaggttgacggtaccgatcggaccatttctctgtttggcaatgatgatctccgagattcctttcatctcggaatcatgattataataatcatcacgatagataaacataacaacgtcggcatcctgctcaatcgcaccggactcacgcaggtcagaaagcatcggacggtgatccggacgctgttctacggctcgtgacagctgggacaatgcgatcaccggcacggaaagctctctcgcaagtgcctttagggaacgggagatatctgagatctcctgctgacgggaatcagatcccctgccggaaccggacatcaactgtaagtagtcaatgatgatcagcttcagatcatgctccaacttatatttacggcatttgctccgcatctccgcgatggaaataccaggcgtatcatcgatgataagctccgaattaccgatcgttccggcaccttcgatcagcttctcccagtcagaatcagagaggttaccggttcggagtgcctgtgcatccacccttgactctaaggaaaacagacggtttacaagctgctcctttgacatctcgagtgaaaagatcgccgtgcacatatgctcgtgaaatgccacatactgcgcaatgttaagaacaaacgccgttttacccatggaaggacgcgccgcgatcagaatcagatcggacggctgtaagcctgctgtgcggtaatcaagatcaatgaagccggtcgggattcccgtaacggtgccggatgtcttggccgcattctcgatcttttcgagcgcattcataacgacctggcggatcggcacgtaatcaccgcctccgccgcgtgtggaaagcagatcaaacacctttttttcggtgatatccatgactgtttcaacactctcttttcccatgtagcactcgttttcgatctcttcatttaatttgatgagcttgcgccgcatggaattgtcttttacgatctgtgcataatattttacatttgccgaggttgggactgcatttaacagatcccttacaaactctaagcttgcaatctctgccggcacatctttttcttttaatttattctgcaaagtgaccagatcgactggaagtcctttgctgtataattcgatcatggtatcaaacagtatcccgtactgcttataataaaaatcctcactgatgagcatttccatagcagtgaggatcgcgtccttgtccatgatcatagagccgatgaccgactgttctgcctcgcggctgttcggcatcgtgcggttgatcagtgtttcttccattcctattcctctactacatgtacgttaaattttcctactaccttcggatgtagcttaattgcaacttctgtcacaccaaaggtacggatcggctccggcagctgcattttctttttgtcaagttccatgccaagctgtgctttggctgcaacagcgatctctttggtggaaacggaaccgaatgtacgtccgccctcaccggccttcatttttacggtaacttttttatcttttaactcttccgcaagtgccagtgcagcttcatactgctcctgtgccactttgtctgcgtgctggttctgcagttttaaatcattgaggttttttggtgttgcctccacacctaattttttcgggaaaatcgcattgcgcgcatagccgtcgctgacattcacgatctctccttttttccctaatgcttttacatcttctaataaaataactttcatatataaaaccttctttcctgattattctgatatatcgccctcttttaacatctcatcaatcgtatcctgaatgatatgttttgcctgctgcagtgagcagttggtgagctgggctccggcaacgtttaagtgtccgccgccgccaagacgctccataataagctgtacattgatttcatcaatggaacgggaacttacataaatctttccctggtattccgtaagcacaaaagacgctttgatgccgacgatatttaaaagttcatttgccgcctgtgcacagacgatggtcggactctccacctcatctgccggacagatggaaattgcaaatgctccccggtaaacttctgcatgacgcacagcttccgcgcgcgctttgtaagctgccatatcgttgcggagcatcttgcgcactctcgtcacctccgcacccgcacgtcttaaataggctgccgcctcaaaggttcgtacaccggtttttgtcataaagttgttggtatcgatcaggatacccgcataaatacagtctgcctcacacggagcgaggcggatattttcggaaaaatactgcagcacctcggcaatcatctcacatgcacttgaagcatacggctccacataagaaagaaccggattctcgatcacctcatttgtctgtctgtgatgatcgaatacacagacggtctgcgtgcactttaacagttccggacattcggtgtagctcggacggtttacatccacaacgaccaccagtgtattttcattggtaagcataagtgcctcttcatttttgataaaaaggtctgccggatatcccttttccactgtaaaacactctaccagcgggcgcagggatgaagtgatctcatttaacacgatctgtgcctttttgccaagtaccttggccgcacagtaaataccgatcgctgcaccgagggaatccacatcgctgatgctgtgtcccataatgatcacatgctccctgctctcgatgatctcacggagcgcatgtgcttttaccctcgccttaactctggtgttgcgctctacctgctgcgtctttccaccataataagtaatatcctcgccatcacgcacaacgacctggtcaccgccacgtcctaatgcaaggtcaatggacatacgcgcatactcataattctgtgtatagctttcgccatttgcaccgataccaatactgagtgtcaccgccatctcattgccgaccttaactgtttttacatcctcgatcaggctgaagcggtcttcgcggagttttgcaagatactgatatttcaatacaacaaaatacttatctttttcaatcttgcggactaacgcatccaattccgtaaaatatttattgactttccggtcgatcagcgccaccagaagcgatctctttacatcttcaatgctgtcaagcgcctcatcatagttgtcgatatacacaagccccgcaaccattttctgttcctggttttcccgcatgtaacggttcttttccgtctcatcgaaaagatacaccgctgtcagatattcgttgctttcatcgagcgtaacaagactgtccacactgtttaactcttcaaagtagattctttttaaagaaacacggaaatcctgatctttcaatttcaggctcactgattctgacccttcatttttctgtagaaattcctttgtcaatgaaggaaaaatcgtcgtgatcgacttgtgatattttttatctttcccggtcagttctgtaaactgttcatttacccacaaaatcttcgcattgtagtctaacagtgcatatggtatctcaaattcatttaaaagctgcctctgtactgttccgtactgcgttgcaaaattgatcagctcattgactaaaaccggcttatttctcacatacacgatcagggacaccacaaaataaattgcggtaaatattgaaaacatcacacctgaaagtatgtcatccatatagatcacgacattcatacatatcagaagaatcgtcatgaacatgggccagtaaagagattttcgaagtctgcctctgagctttactttattacttttcataatactaatctcctaaataaaaagaaacccgtgaccaaaaacgcatatgtcaccgcttattcttccactcgtcctagaatagtctttgctaacaattatagcattttgccctcttaagataaagtattttttaaaaaaggaaccgttgcagtcattctgcccgattcctttttcctgtctgtgacctgatccggtcgtatttagttctggctctccgtatcccgcggagcaatcgtgaggtaattatcggtatccatatcattgatcagattatccgataaaatcctgtcaccggaaactttcggttcttcccgcacgaaactctcctcgtcgagttcataccccgtttcttccctgtaaacagcgctgataaatccggattcctgtccaccgccataaattggaaaaatgatcgtatgccagtcattttccatatcttcactgatcattaccggagtatggatctgcgaaaatgctccaagcacctcgaactgaccattttctcccggtcttaaaataagtgccgcatccccgcgattatcagatgttgtatctccgatcgtgaccgctacgatctcatccgttccgtcctcgttaagatccgtgtaattatagtaataccgtgtctctttgcattcttcttccggaatctgataatactccgtcagaaatgctgcaagatccggatattcctcatcctcagaatattcttccatcacattgtagttttgttcgtcctgctctgccgaaaagaaatgttcttctaatgttttctccgtctgggtatctgtctgttccattgtatttgcagtatttttttgtccgcagcctgccatacctgccagcactgtcaggaaaaataccatacctaatgtctttttcatgtatcctccacctgtccgtactgcttaccgttttggtttatcatatatattatatgattccatgcacaattccaagacattcttgcgaagtttaagaaatcctttagacattttactcttacgtccaaaccctacaacaatctctgaatctcctccaacgacggcatgacacgcagggcaccttttcttgtcgtaatgatggatgctgctgcattggcaaatgtgagcatttcttttaactgctgttttgtaaggttatctaagccatactttaatatatggtgcaggcagcatgccccaaaggtgtctccggcaccggtggtttcgatcgtgtttttctgtaaaaatgcaggaacttcaaccagcatatccttataataggctctgcttccgtcctttcccatagataaaaggatgagcgggatctgataggtctgctgcagcatgtggatcccttcggtgtaatcttctttcccggaaaaccactggatctcattgtccgaaatttttaagatatcacagacggataaaccgtatgccatctgcgttcttgcatcttccatgtctttccagagcggctccctgatattcggatcaaaggaaagaatcgcgccgttttcttttgcggctttaattgcatgtcttgtcgcacttctgaccggttcattggtcatggatagtgtgccaaaatgaaagatttttgcatctgcaataatgtcatccctgacctcatcctcccggagcatcatatctgcacccggattccggtaaaaggaaaaatcgcggtcgccgtccggctttgtctcaacaaacgcaagcgtggtgcgcacatcctcatctgtcagaagtccgctcacatcaattccggctgattccacggcagcacgaagctgtctgccaaaaatatcatttccgacttttcctaaaaatgaggtgcgatgacctaacttatttaacattgaaagtacattacacggtgctcctcccggatttgcctcatagaccgggttgccctgaccactggtgccgttttctgtaaaatcgattaatagctcgccgagagcggctacatcatattgtttgttcatttatgtgctcctttctgctatgttaagctaatgcaaagttctggtttggtttgttggaacgttgagagaacggggctgcttttgtgactttggtagaaaattagaaaaacttagtatgcctgttaacacacagtgttgtgccgccacggacggcagcccaagtcctaatgtgcccggatggcacatttaggacgcacacgtcactccgccacacacccccgcaggcatacttagcttttcttattttcggacatcggaacaaaacacgccccggcttcgctcaatttgccttcacagcacctccggcatccacctttccatatattttccttacacttccttaacgtacacctgccacgacttatactcattcccaagccgcggaaccggcagccccgcatgcacaagctgtgcccctgtatagtactccggctcaacagagttcggtgtcccattgatccgctgcccattttcgccaccggtctgcattccgacaacttccacccggtactttttatcttcgccaagtccccgcaacttcacatactccgtcgccggattacactgcgtatccagcgttaccacagtaaccagcgcctcgcttccatccggcctgcaatactcccacgcagcatattcttttttctgccagacatctgtcagcctgtaatacctgccctgccggatcagcatctcaaaacggtgatagtttttgatctgctctctgacctgttccttttcttcttccgtcagcagatttaagtccagttcataaccaaaactgcccgccatggcaactgctgcccgtgtcgcaagttctgtcattcttccggtctgatggttcggaactgccgacacatgggaaccgaccgtgcaggacggataggcaaaggatgttccatactgtattttaatacgctcaaccgcatccgtattgtcactgcaccagatctgtggtgtataatacaacattcccgcatcaaacctgccgccgccaccgctgcatccctcaatcagaagatccgggtaacgttcatgcagccgttccaaaaaatcataaacaccgagcacatagcggtgcaggatcgcaccctgattctgctctgccgccgttttcgaccagatatccgtgagatgacggttcatatccatcttgacataatcagccttcgtgtcatcgagcactttcgcaatctgtgcaaaaataccgtccaccacttcttttctggaatagtcgagcacaagctgatagcgtgcacgcaccggttttcgtccaggaatggtaaatgcccagtccgggtgttcccgatagaggtcactgtcctcacagaccatttccggctcgatccagatcccaaatttcatgccaatcccacgaattttttctgcaactttcccaagcggcatcccaagttttttctcattgaccgtccagtcgcccagtcctgccagatcatcatcacgttttccaaaccacccatcatcgagcaccagcatctccacgccaagctccgccgcctgttttgcgatctctatgattttttctccggtaaaatcaaaataagttgcctcccagttattgatcagaaccggtcttttggtatcgcggtatgcactgcggcagatgtggctgcggatcagacgatgcagattccacgaaagtgttgaaaaaccatttgccgaataactaaatgccgtctccggtgtatcaaacgtctctcccggctctaatttccaggagaacatttcgtcggacaagcccataacaagcctcgtctgctcatactggtctttttctgcctccgccttaaaattgccgctgtacaaaagcatacagccgtaacattcaccggcatcttccccggtctgttttcccgccagcatcacaaacggattctgctgatggctggatgacccgcgcctgcttccaaatacctgattgccatgctccaccggcgtacgctctaagatccgctccatcccgtgtctgccatgaaaatgaatcacatcaaattctccggtcataaaatcaagtacagcgcttgctgctttttcaatatgaacagcctcctgcccccggtttgtaatctgcacagcccttgtaataatatcgagctctgcaaatataccataaagcagtgtcacctgcacgccacttggcttgtcctccagatatacctttaaagtctcactctccgtccccgtctcgtcataagctgccggaagacccggtatccgatattttccctcacaaatttcgcaggatacaaaccgcagatcggcacagtaacttccatccgcatttttcaggataaatgccggactgcggaaatctccattgccaaagcagggatattcctgcggcaatgcatccatggaatatgtcttatcacaatctgcttcatacggattgccggaaaatcccctgtcataataagtcagaagataccgcatatcaccacccaaacgtggtccataataaagatggagcagttgtccataagcaccgacagccatctgataagtcgtattttttgtatgtagcgtgatcagtttctgatcctgatctatcctgattgccataatccgtcccctttccatacagatcttatttacgataaaatacttttgcctcgtatggtcttaaatgaattccattttcatttcgaataacatctttataattgctgatcagaacctcttcttccccggtaaaaccgtcctccaaggcaaaatccatctcctgctccctgaaattgcagattacaaacagtttttcatttccaagtgttctggtgtacgcaaacacatccgggtgttctaacgctttgctctcgtatacaccatacacaatgatttccatctgatgacgcaattcaataagcttcttataataggaaaatacggaatccggatcgtttatctg

SEQ ID NO: 5156 - DNA, 28155 bp, Unknown
  gut microbiota DNA sequence
tccgattgcaacaacctcatgcccgtcaatctcccccggaatataaagtgccgtcgcatttccactatatcctgtgatcgtagccctgtttgcatcgtcgagtgtataggtataaatcggtacgatcgcaccgccggcacctgctcccgcatcaaaatagcttcctacgcccgccggattgaaatacctcgaacctggagatgtccaataacttgtccagcctccctgcgcggcaaattcttttccacgcgtgcatgatgtccgaagtacgccgtcctcaatatgatagtacacgcgcaccggactgttattctttccccagatctctatacttttgctaaaggtctttgatgcaataccaactccgatctttgcacttgcccccaccgatgcatacagatatgcagcctgtgacgcgcagtatgtcggtgttccggaactgtaccttacgtatttgatgttcatacgtgcaccggtttttgcataaatatctccgctgacaattccgagcgttgcttttgcagagagtacaatacctgtggtcaaatctgcttctgctgaaaaggaaaatccttttttatgactgtttccaactatacggaatccgtccgaatacgcaaatccggcttcaaattccttttccacggtaagcgttgcttccccggaaagattatattccattgccagtgtcaacataccaacaccgccgagcggcactgcccctaacgtcagtgtgtggttaatatctttaaatgcatccccttttacattgcaggagtattccatatctccgctgactgaaaaataatagtcattattattcagactgtaatttactttcatgtttgaaatcacaacacttactgtcgctgtgacatcatctgagacggaaatcgttttatctgcacgcagggtattgtttttataggatatcccccttgtcataccttctgtgactgtaacaccatttaccacatatgtttcttcatctgccggaataaattccgtcatatcaacatccagttcgccctgctggtcaacatttaaaaccgcgccatcatccgcatctgaggttgtaatatatgttgtagttccgtctgtccgtacactttctgccttatatgccatgacaatatcgttaacatacacggcaaatgttgttccctgtttgatcgtaaccggacagttttcgatcataactattccatccacatcaatagatacggctgttccctttggtacaacaactactccggacgcaaatgtacaggtattttcttttccggtctctatctgcgcatctgccaaaaccttttttgcatccgcgatcattgcatcatgctcttccgtggtaagtgactgttccgggagaaatttaccggcagcaaccgtaacccatcctctgtcgattgcgatctgtgctgcttccttatatgtaacatctgctgtatcctgataagtataactgtctgtttccggcacaaagccaagcatcgtattcatggtctgcgctgcaaattcacgcgtcactgcatcttccggtcgaaattcttctcctgcctcaagatcgatcattccgaactcgcatgccaccatcacatcacgataaaacgaatcatccgttgatatgtcactgtaataattatccggataattatcctcatctaccgtaagatcaaataatgttaccagttcctgtacccagtcgatacggctgatctcatcacctgataatgccctttttaaaatctcctctgtactctccgtttcttccgtaacgttctctgtttcagcctgttctggctcttctgtgacattctttgtttcagtctcctctgtttcttctgtaacaaccttcgtttctggctcttctgtctcttccgtgacgatcgtcgtctctggctcttctgtctcttccatgacaatttccgtcccggccgccccggactcttcctctgccagacgtccggcattatgatcttcttcatctgcctggtctgtttcttttttctctgtcactgctgacttttcatcatcctgttctacagtctgtgtttccacagtccctttctctttgaaactgttttcttcctgtgtctgctgtgcattccctgccacatccgccagcagcatttccggtgctgccgtaaacgtcatgcaggcacaaagcagccatgctatcatacgttttttcataactggtctcctttcgtagatatctcatttctcttaatacgactaaacggtcttattatgaattaaattatagcattttgattataatttgtctattaagttagaggagacactcacgtgaagtttcaaagaattcaggacttgagaatagacaacgatcttactataaaagaaatctctgccatgcttggtctgcaccgggatgtttattcccgttatgaaaaagggcttcgtgattttccaattgacattctcataaagttagcagatatttatcattgctcaattgattatctggttggacgggttgatacgaagtaatataatacacaaaatgcctactccgcagacattgatcactatatataaagaaaagacgattccactcagaatcgtcttttctttataatatatgcttattttttcccacgcagcagcttaatgatcttcccctcatacaccaccgtcaccacagcaatcagcgccaccgtcaccagactgtatcccttattgatctgcactccggcgacatcacagatactggtaaataaaagactgagcacgaagatcagcttgactgcgcgcaccatatgaatcgtatattttcttattttcccactacatatttctttcggcaggttatttaccctttccggataacgtgcaagcagcgtcagtccaacatatacaaggatcaggattgccgcatttaaaataattccggtaaatgccactccatatacgattccataataaatctgcagtcccagataaatcattgcagctacgattcccactgcctcaagcaggaaatccatatttgtcatttcttcttttttcaaatttatccccttcctgtgctgttcttcatcttctattctgttatttctaaatacattccaaatgccgttttccattccgccgtcagccgctctaaattccacgccgcatttgcggggcttgtggacggcagttttccaagcggcggcattccctctttatgacagtattttacaaaaagctgatgtgcttttccaccatttgcaaaaattccctgtatttttgcatttgataagatcagattcatatcatttggcaccacatttctgatggagctgtcggaagatccaacgatatcacaggaatcgatcacatcccacactgctatgcgatgtcttagcagaagatcctccttttcatcgatcgtctgtggcagaggttccttgaaaatccctgcaatcaccttccagaaccggttttgcggatgtccataataaaactggttctcccgcgactttacagacggaaaggaacccagaattaatatcctggattcctcattatatactggcgaaaacgtgtgttttacatgtgtatattccatttttatgtacgctttctattcataatttttaacgttagaactgtctactttttcaaatggtacccagacatataaaccatcttccgtagcaccctctaaggtcgtgacatcttttccggttgcaagtgcgattgctgcataaacagcactctcaccctgtccaactgcggactggtatacggtaaagtccatctttccatcttcaatcgctttgcatccgtctgcagttgcatcgattccaagtaccgtcacatcactgattcctgctgcatcacaggcatcaatgataccaagtgccatagagtcgttgttgcagacagcaacgtcacacttctgtcctgtctttaaaaatatattgaacatctctttcgcacgatcctgctcccagtcggcgttatcttcaaagacataattgatctttttccctgatgcatttaaagtatcctttaatgactcagatcttccttttgtcgcggaatgttttttcggtccttttaacaacaccacattgatctcatccgcagaagcaaatttatctagaatatactctgcctgatactgtcctgccacatattcatccgatccaacataaatatatttcccagcctgaagtctcgactcatccgggcagctgttaaaaaatacgattggtatatcacctgcaagcgcttctaattcgaatgccgtatcagcatcaaccggtccgcataaaatcacatcataattctcactgaccgcctttttgatatgctccacctgattttcaatggaattgtccgcatctagcacatccaactgtaccccacactcttccgcagtctgctgcgcctgcgccacaagtacatttcggaaggtatccgcctgtgataacgacagcagcatttttaaaccttttccatcagctgcgcctgtctgtgtatttccaccacatccggcaaggcatcctacgagcaatgccagacacatgatagtacttattaatttcttcatcgcacgatctcctctctatatccggaactgttttacctgatctgcaagctgatctgcagaaacagcaaggttatctgcttcctgttctacctggtcactgttctttgaaatattctttgcctgctgtaacatggattctgatgttgcaaggatctcatcggaacttgccgcctgttcttccgaaatagctgcaacattcgtagcaacctgatctacctgattgatcttatcaaccacattgccgatcagtgcgcttgtctcctggatattcttaaagatcgtatcaaatgtatcaactgctgtatggatcagctctgcactgccggaaatatcctgtgcactgtttcctgcctgtctgacggcatcttctaccagattgttgatctcagtgatcagctctgtgatatgtgctaccgaatccgcactgttctttgcaagtgtaccaatctcagttgcaacaactgcaaaccctcttcctgcttcgcctgcgcgtgcagcctcaatcgaagcatttaaagataacaggttcgtctcgtcagcaatatcaccaatcagtttgatgatctgcacaatctcgcctgaagcggttcctaccttattaacagcctcttccagattgtgaatggaaacttcgatatttgagagtgcctcaccaacgcgctccatatccttacgtcctttttcagaaacagcaaccgtctcctgcatcttgctttcaaccatatcactgtcgctcttggtatctgctgccacacctgcaagctgcgttgcattttccgcgatctcatttacagatacagacaactgatcaaccgtcgcgttcaactcgctcatcgactgtgactggattcccgctgccgaactcatctcaccggaaacacccttacttgagtcagcctgattcttcaacttgccggaaacatttcccatctcggagatcatctgtttcatggaagcaataaacttctccacactttggctcatgactgcgatctcatcattgccttttgtcttaatagaaaccgtaaaatcaccggaagtcatcgctgtgatcactcttgtcatttccttgacaggtttgattacaacatgagttacacgttcgatcagtacacagagcaatgcaatacagatcacactgattacgatcataatattacgaagctgtgtcagatccgaaagtacaatgctggtcggaatatacgatatcaaaagccagttggttccgtctacttcctgaaataccgtcatatttccatcaagtgtagcaaaattatagtctttctctgcagctttctctgccgtaagctggtaaaaatgactctgtccttctgccccgagtgtctgggaaataagagatgaatcacggtttgccaggatcacaccgctggttttatcaaccagaaatgcttccgcatcattcatttcaataaaagagtttacgataattgcaatacggtctaatgtcatgtctgctgaaataacacgcactttatcagatccgtcatttaaaataccggaggcactgatcacattcacgccatctgcattctgataagctgaaccgactgccatattcaccctggtaagtccttctttataccaggtactgtttgttacatctgattccttttttgttgattctgatgccgttatgagctgtcctgtggaatctgccacataaagtccctccggataattactgttatagccataataaccatccagtattgtctttaactcttcatcactcggcttcaaatcctcaatgatcgtcttcgccatctgaaatgaagcaaggttttcattcagccatgcttctatctgggatgcctggttctctaccgaagactgcagtaaattctgggaatattttttgatcgtccctgcagatatctgataagcagccacaacaagtaccacaacgatcgcaattacgactggtatgatcaccccaagtaactttgccttaatcgacaccgttttttgttttttcataagctgtcctctcttttttacataaaatttacaacataaattataaaatcttcgtcgtttttcgtcaatatgtatcacaaaccgttttcgctaaaatttatattgtatacatgtatttttcaagaaatcgtatgatcttttcttgaaaatgagacctgctgtgctataataaattagtgtgccattttctttttcatacatatatcaggcacacgggattggtatcatgccgctgcatgcggtttataccagagaggagaaccttagatggaacatttaatcattccaaaagattatcattcagaattaaatctgcacgatacacagattgcaatcaaaacagtaaaagattttttccagaacctgcttgcacttcgtctgaatctgtcccgcgtttcggctccactttttgttgatccgttatccggtctcaatgacaacttaaacggtattgaacgtccggttactttcgatatcaaagagcagaacgggaaagaggcagaggttgtacagtctctcgcaaaatggaaacgctacgcattaaagaaatacggtttcgactacggtgaaggtctgtataccgatatgaatgcgatccgcagagatgaagacacggataacatccactctattttcgtagaccagtgggactgggaaaaaatcatccataaagaggatcgtaatatcgagacattaaaagaaacagttaccactgtttataactgcctgcgcaagacagaaaaatatatggcgatccagtacgattatatagaagagattcttccacatgatatcttctttatcacgactcaggaattggaagaaatgttccctgacaacacaccaaaggaacgtgaatattatattacaaaaaccaagggtgccgtatgtatcatgaagatcggcgatactttggaaaacggagagcctcacgacggacgtgctccggattacgatgactggtctttaaacgcagatatcgttgtttactatccggtactcgacatcgcacttgagatttcctccatgggtatccgggttgacaagaaagcgcttctctcccagctcaaaaaagcaggctgtgaagaacgtgcaaaacttcctttccagaaagcaatcatcaacgaagagcttccttatacaataggtggtggaatcggacagtcccgtatctgtatgttcttccttcgcaaggcacatattggagaggtacagtcttccctgtggccggaagctatcgcaaaagaatgtgaaaagaacggtattcagcttttgtaacaggaacgggcatatgctccgcagatatcctgtcatcaacactgatgcctgataaaaaacaggtatgtttcaaatgtcagcaatgagctttccctgctccctgctgacaaaaacatacctgtttttttcacctttctgttttttcagttctgtgcgatttccacaattttccggtcttttcaatcccgtgtgatttccacaatcttccggtcttttcaatcccgtctggttctcactatctcccgtttttttctcctgctatgattccgtaatattccggtcttctgtcccggaaaagtccccattccagtcgttttgcccgaagttcatccagttcataggtctggctcaggatttcttctttatctctggaagcacttaagatcacctctcctgtttcatccgtcagaaatgaggaaccataaaattccagtgccgactcctgtccgccattttccgcacatggctgcactacttccctgccgatccggtttgcggcaatgacaggcatcagattcgcagccgcatgtccctgcatgcagcgtctccagtgcggcatactgtcacattctaaaatcggttccgagccgatcgctgtcgggtaaaacaataattctgcaccgagcagcgccatcgcgcgcgctgtctccgggaaccactgatcccagcagattccaataccgatgcaaccgtattttgtatcaaacactttaaatccggtatctcccggtgtaaaataaaatttttcctgataataatgatcatccgggatgtgggttttccgatacacaccgaggatcgttccatctccatcaatgcatgcgatcgaattatagaggttattgacatcacgctcataaaagctgattggaagcaccacgcccaattcttttgcaagacgtactcccattgccacagcttcactctcctccacagttcttgcatagctgtaaaaaacatatctgcgctgctggcagaaatattcccgctcaaaaagttccggcagtaagatgatatttgcgccttccgcggcagctttgcggatcatttgttctgctttttgtaagtttttcttgtgctccaggtcgcatttcatctgaattgcggctgcttttatctgtctcatgcgtgtatcctttctgttctttttatttttgcacagtgaattaattctcctatacggaaggttgtacaataaattccctataagggaatttgctgtgtaatacagtggatgtttccaccgcctgtcagtatatctcttgcgtacaccggtatgatttttctgtccgggcagagttttgccataatctgctgtgcacgcaggtcgctttcttcgttttctccgccaaatacaggcatgactaccgcattgttggaaaaataaaagtttacataggaggcggcgagccgttctccgacttccctgacatcttcaccttcctcaaattcgtatccttcgagttcttctttggtgatacagaccggaatatccggaattggaagtttgtggatgatcagctttctggcctttgcgtcccgcaccgaacttagatactcaaaactcgctttcgacatcgcatactgcggatcattctggttattggtccatgcaagcacaacttcacccggtcttagaaatgcacagacattgtccacatgctcgttggtctcatcctgatagatcccgcgtggcagccataaaactttctccacgccaaggtaacactttaactgttcttcaatctgctcctttgtaagcgatgggtttctccccgcactgagcagacaggactccgtgacaagcaatgttccctctccgtcgctgtggatagaaccgccctctaacacaaacggttcggcatcataacagtcaaactcgaattttctgcagaaattccatgcaaacgcattgtctttttcataagaagcatatagtccatccacttcaccgccccaggcattaaaagaccagtttacaccgcgcacctgtgagttttttacatcatcacctgtctgcgccgtaccatttcctgctgctgtcaggtctgaaatctttccatccgttctgtttaccagaaaggtcggcgcaacatcccgcgcccaggaatcatcggtctccatctcaaagacaaccaccggatgtaagttttcttcttttttcagactttccgcaaatgcttttgcatggtcaatccccttttttccggcagcgatatacactgtctcactcgcggcgattgcgcggatcacagctgaaaacgctgtttctgcttccttcgcgccatttctccaggaaccgggacgctccggccagatcatgatacatccctgatgctgctcaaactcacccggcatgaaaaatccgtcctgtaccggtgttgtatcttttatcatcttaggacagtctgcctttgaaatcttcataaccaaactcctttatcatctcgacatctccatcttcccgtaagactgcaattccgggcagcggcatcccgttaaatgtattgtttttgaccatggaataaattgccatatcctcaaagaccagacggtctcccacctgttttttctgtgcaaagctgtaatcaccgatcacatccccggcaaggcaggtcatggaagaaagccggcaggtatgcggcttttcgcccggcagataaccgtcttttagcggcggtctatatggcatttcaagcacatccggcatgtggcatgccgccgatgcatccagaatcaggatatccattccattgtgtacgatatccataacctccgtgacaagatagcccgcatttaatgcgatcgcctcacccggttccaggtagacccggacattatattttcgcctgatctcacagattaacttctttaattcatccaactgatagtctgcccttgtaatatgatgaccgccgcctaagttcagccattttacctgttttaaataactgccaaacttctcctcaaacgcatgccaggtcgtgatcagatcatccgcattctgctcgcagagtgtatgaaaatgtaatccttcgattccctccggcagttgatccggaaattcacttttaaccacaccaagccttgatcccggtccgcatggatcatagatctcatgcccttcctgtgtggagcactccgggttcacgcggatcccggcacttgcagtgcactcctgctgcaaaaaatagtgctgatacttttcatactgcgcaaaggaattaaaaataacgtgatcgcagatctgcaccagttcttccatatctttttccttataagccggtgcaaatacatgattttcctttcccatctcctcttttccaaggcgcgcctcaaagattccgctcgccgtcgttccgctgatatactgcccgatcagcggatacagtgaaaacatggaaaatgccttctgtgccagaagcacatggcagccggtttcctgttccaaattctgcaatatttttaaattttgttttagcttcttttcatctaccacataacacggggtaggaatctcctgccatttcatgataattctccatttctgcaaaaatccgctgcgcaaaagctgacaaatttaaaattttatccaacccgtttcacacatattcttattttatgccaccgtctgcggattttcgtccacaacccatggcagaccatactggtttaacatatccataaacggatccggatcaaactcttcaatattgaatacaccgtctttgtcccagactttatcgacaaccaacgctgcaccgatcatagccggaacacctgtcgtgtaggaaattgcctgggaaccgacttctttgtaacattcctgatgatcacagacattatagatataaatcgtcttttcttttccgtctttttttcccgtaaagatacagccgatatttgtttttccaaccgtgcgcggtcctaaagatgccggatccggaagcagtgcttttaagaactggattggtacgatctccctgccctcatactcgatcggtgatgttgagagcattccgacattttctaaacatttcatatgtgtcagatagctctgtccaaaggtcataaagaaacggatccgctttactccaggtacattttttgcaagggactcaatttcctcatgatgaagcagatacatgtctttctcgccaacctgtgggaaattatattctcttttaatttccatcggttttgtttctacccagtgaccattctcccagtaagaaccgtttgcggaaacctcacgcaggttgatctccgggttaaaattggttgcaaacggataaccgtggtcgccgccgttacagtctaagatatcaatcgtctcgatctcatcgaaataatgtttcagggcataagcggtaaatacactggtcactcccggatcaaacccgcttccaagcaatgccgtaattcctgcctctttgaatttttcacggtatgcccactgccaggaatagtcaaaatatgctgtaaatccctcttctttacagcgtttttcatagatggcacgccattctttgtcatccgtatcctccggctcataatttgcggtatcgatatagtctactttgcatgcaaggcaggcatccataattgttaaatcctgatatggcaaagcaacatttaacacagcatccggctgatattttttgatcagggcgatcagttcctccgtattgtccgcatccacctgtgctgttgtgatgacagtgtccgttgttttttccagtttctcttttaaggcgtcacatttcgattttgttctgctcgcaatgcagatctccgtaaaagttttgctgttctggcagcatttgtgaatcgcaactcctgcaactccgccacatccgataattaataatcttcccattttaatctcctttcctgcgctgtctttttgcgcatctcaagtttgtgccggggcacaaatcttgcgtgtaaaaaaataaattttaatttaatttttattatttcttacgtccttcttcttcctctaacatatcctccacatatcgcggcagcataaatgctcccttgtgcagattggtggtataataccaggtttttatcttccgctctttccagcgctttgcatccagatcatcgagcggatgatatttctttgacgcaaacccgaacagccagtatccggaagaacacgttggtatatgtgcctgatacacgcggctgattggaaagctatgactcgctttccggtgcataccgcggcaggattcctcatcttcatcgtaaaacggacttccatgctgatataccatgattccgtcatcttttaaggcacggaagcagtttccgtaaaattccttggtaaacagtcctgcagtatgtccaagcggatcaatcgcatcgttgatgatcagatcatactcgtcatgtttcatccgcaaaaatttcaatccatcctcatagtacaccgtcacgcgttcatccgataacccgcatgcattgtccggaaaaaattccttgcagacctcgacaaatacacgatccggctccacgacatcgatctgctctatctcatcgtaatagccaagctctcgtgccacgccgccgtcaccgccgccgatgactaacacctttttcacatgcggatgcaccgccatcggaacatgcacaatcatctcatcatagacaaactcatctttttccgaaaaaacaatactaccgtcggaacttaaaaaacgcccaaactcatccgaatcaaacacatcgatccgctgaaactcggtctgtaaaccaaataactgtttctgcaccttgaccgacaccttgactttttccgtgtgataatccgaaaaccaaagttccatgatcttctcccttcttttgaaaaaatcttcttttcacaggaatctttatttttgctgatctatgctgttatttctttgcaagcacattcagattttcaacttccggatcctccgttccctgcatagagcatcccttttcttttgcataaacaatgtactcaatgatctccggcgtgatcatctcacccggcgctaaaatcggaattccaggcggatagcacatgacaaattcaccgcagatccttcccgctgtctgacgaaccggcagggattccttttgcgaataaaatgccacctgcggcgacactaaaaccttcggattaatatattccgtattcagcatttttgccggatctttcgaatacagccgtttgatgtctgcaagtgcacccacaagccgctcaatgtcctgtatccggtcaccgatggaaatataggcaagaatatttgcgatatctccaagctcgatctgaatatcatattcatcccgcagcagatcataaacctcaatgcctgcaagcccgatatctctcgtatatacagacagttttgtcacatcaaaatcatagacactgccaccgtttaccatatctttgccatacgcataaaatccaccgatagaattgatctcatccctcgcgtactccgccatctgtgccactttcgcaaaagattccttccctcgcagggcaaggtttctccgcgaaatatcaaggctcgacatcagaagataagatgcactcgtcgtctgcgtcagattgatgatctggctgacatattcccagttcacaccctttccggtcagaagaagagagctctgcgtcaggcttccccccgacttgtgcatggagacagacgccatatccgccccagcatccatggcacataccggaagattttccccaaaatacagatgcgttccatgtgcctcatccaccagcaccagcatatgatgttcatgcgccactctcacgatagaccgcagatccgaacagattccatagtaagtcggattgttgactaaaactgctactgcatccgggttctccaaaatcgcacgttccacctctgacacctgcattcccagtgaaatgccaagtttcacatcgacctccggattgacgtaaaccggaatcgctccacagagcaccagtgcattaatcacactcttgtgcacatttcgcggcaaaatgatcttatcccctgccttacagcaggaaagcaccattccctgaacggaggaagtggttccgccaaccataaaaaatgcatgttccgcgcgaaatgcctccgcggcaagctcctccgcttccttgatcaccgaaaccggatgacagagattgtcaaggggcttcatggaattgacatccagactcacacatttttctcccaacagctctaccagctccggatttccccttcctctcttatgtcccggcacatcaaacggcaccactcttcgtttttttaacttttccagtgcctcataaaccggcgcacgcatctgctgctctttgtccatgactaaaaaaatcccccttggcttccataaaaatctgcatgctctgcttttcatcaaatgtttttccctgacattaccgtcaggctgaaaaactcaaaaaaaagaacaggcatccatcacctgttcttctatcgtcgttatcatcatagtcatactttatgtaatctatctacattctgcaaaaactattttctccagagtccgcgttggcatctttgccagcaaatatttgcgtatactactcttattgaccgtttcacaagtgatattggattccgggtatcatccccgtaatcaacttataaaatttgagcttctaactcaatcaataacgcggcttacaccgcaatcggcagttgccccgcctgtccgtatgggcttaaccaatctcttggtgggcaaacaatagatccttttccatctattgtaacgaatatttgcatgaaaacaattttcgcattcatgtgatttgaagtatagcatacacacatggcaaatgcaataacgtattctgtaaaattctggtattttcttttttatttcattttaggatatttttattttctattcaggtttgcagcgatcttaccgcgtccactcccggaccatctgtatctcccgtctgtacccctcatcatcgttcggtgtctctaagataaacggtcttccttctaaaagcgggtgcaatgcaacgcgccgcatcgcctctgcaccgatctttccctcaccgatcttcgcatgacggtccttgtgggagccacagtcattcatgctgtcattaaagtgaactgccttcagccggtcgagcccgatcacacggtcaaactcatttaacacatcgtcaaggtcgtttacaatgtcataaccgccatcccacacatggcaggtatcgaggcagactcccattttatcgtttaattccacacggtctaagatttctcttaactcctcaaacgttcttccaacctcagttccttttcccgccatcgtctcaagtaaaacggtcgttgtctgctccggtttcaaggcttcatttaatgcttccgcaatcaatgcgatccctttttccgccccttgtcccacatgggcacccggatgaaaattataataattgtacggtgtatactccatgcgttttaagtcatcaagcagcatttcctttgaaaaagaacggacatcctcttttgcagcgcagaggttcatcgtatatggcgcatgcgcaacaatctttccaaattcgtgctcctttgcaaaatttaaaaacttttccacatctttttcatcgatttcttttgccttaccgccacgcggatttcttgtaaaaaaagcaaaggtattggcatctaacgccagcgctgcctttcccatcgccgcatatcctttggatgcggataaatgatttcctattaacatatcaatcctcatttctgcattgcgcttcgcgcaccttaattttgtgcacaataatactcctgtctgtatatgcgaatgctcttttattctgcccggttcttctccacgatcgtgcccgctctgtatgccgcgagcagctcctcaagatcatggatcgactcttttaaactttttccgatatctgtatcggcaaccgtttttctccgcacgacctgctgcaccagaaccgtatgggatacgatatcgcttccgtcctgcaccgctttttctaccgattcaaacggttcatgcgccgcaagcaccagaccataagaattataaatcagcgtatatccggcaatccccgtctttggctgatatgccttggaaaaaccgccgtcaatgatcagaagctttccgttacatttgaccggagactctcctttttttgcctccaccggaatatgaccgttaatgatgtgcgcctccgcaccttcaagcccgaattcctctaaaatccggttgaccacttcctctttttcaagcagcctgtaataaggatttttcggctcctgatgcgttattttatctgcaataaaataacgctcaaacgtcgtcatctttgcctttccaaacaccggggaattctggttttcccagataaaccataaaatgtcctgtccctttttcttctccttcgggtcgatcgcataatagccttttcgcgcatagccctcaagcacatcataaagctcttttccggcatattcttttccaaaaacgttaactctggtaaacgtgccatcctcattcagcggcacgcatccatgatagagaagatttccattatatactttgtaaagacttccctgtgtatacaaaaaacgcacatgacgctgcagtttttcacagttcacaaatgcagtcacaagacgctccatcacatccgcctcatcttctgagagacgatatggatcttcccagtcgattgtcggaaaactgacatccttgagcggatactcggtttcctccacacacacggtccccttttcgatgttgatcttatcgagaagaagtcttttctccatctcaaattccgggtgttctttgatcagctgaccttccagtttaaactgcatgatcgtgatcgccttatgcattttttcatctaaaaatgcgtcgtgcacatcatattcatcttcccggtaatccagcttaaaacagtcacaggaatccttatcataccacttcatcgcaaatcttgccagcggcaccagattaatcccgtaaccgtcctctaacagatcaaggtttccatattttgcagaaatgcggatcacattacagatgcatgccgcactgcccgacgccgctcccatccagtacacatcgtgattgccccactggatgtccacagagtgatgctccatcagtgtgtccatgatcagattcggatatggtcccctgtcaaaaatatccccgaccacatgcagatgatccacaacaagccggcggatcagattacagaacgcgatcacaagctccgccgcccttccggtgcggatgaccgaccggataatttcattataatatgcctcctgatcggatatctcctgtctgccggtcaaaagttcctcaatcacataggcaaagtcttttggaagtgctttccgcacttttgaccttgtatacttggaagatgcatttttacagatgcggatcaggcggtataaggtgactttgtaccagtcctccaaattatcttccgtctttaacacctgttccaacttctgttccgggtaatagatcagcgtggcgatcgcttttttctccgccgcgctgattgcattgccaaattcatcctctattttccgcttgatggcaccggatccattttttagcacatgtaaaaactggtcgtactccccgtgcacatctgtgataaaatgttctgttgcttttggcaggctaagaatcgcctgtaaattgataatctctgtcgccgctgtggcaatggtcggatactgatttgataaactttttaaataacgcaggtcggtctgccccatagtattcctcatttctttttcacgttcatttgctgcttttttatcttatcataggaaatgagcgggggcaaccaacgttaatttattgtcaatgctctacgcgatcgtagccttgatcacatcccccatatcatagaatcccgccggttttccggacaggaattttgctgcctgaacagctccttttgcaaatacacttctggaatatgcagtatgcttaaactcgatcacctcatcaagtcctgcaaagatcacctcatgttctcctacgatgctgccgccgcgcactgcagagataccgatctctgttttttctctctttttgcgctctttgctgcggtcataagtataggtatatgcattgccaagcgcctcattcatggaatcggcaagtgcaagtgccgtaccgctcggcgcatccagtttctggttgtggtgtttttcgacgatctccatatcaaaaccggccggtgctaaaatggttgcagcctgttttaacagttccattaacatattgattccaagcgacatgttggcagattttaatacggcaacttttttcgatgccccgtccaccttttttaactgctcctcagaaagtcctgtcgtgcagagtactaccgggatctgcttgtccacactatataccaaaagatcatccactgcttttgcattggaaaaatcaatgatcacatccgctgccacatcacagacagagatattggggaataccgggtaatcgtttttgatgccatcgtagagatcgattcctgccacgatctcaatctctgcatcctccttgcagatccctgtgatcacctgtcccatttttccgttgcatccactcataattgctcttatcatattgttttttcctctcttttctttatttaaagcaacaccggaaacgctgcgaaccaacatttccggtgttttttcaaatctggctttccgtgttccactgccccttacgccagcttgatcccataattcttcattgtttccgcaagttttgcagcattggcatctgtcatctctgtgagcggggaacgaagcggtcctgcctccatgcccatcagattcagcgctttcttaacagggatcgggttcacttcggagaacagcgcctcaatgagcggctgtgcctttagctggatctccattgcttttttcgtatctccgtcaaagaatgccatacacatatcatgtacatccttcggtgccacgtttgaccatacggagatcacaccgattgctccgatcgacattaacggtactacgattccatcctcgccggaatacagatcaagctttccatccgttaaatacatggtctttgctgcctgtgcaacatttccggttgcctctttgatcgcaacgatgttttcaacatcatggtacagttttgcagctgtctccggaaggatattgcatccggtacggcttggaacattgtacatgataataggaagttttacagaatttgcaatctctgtgtagtagcggatcagacctccctgtgttgctttgttataatatggagttacgcagagcagtccatccacgccggctttttccgcttcttccgaaaggtggattgcctctctggtacagtttgaaccggttcctgcaacgaccggaatacggtgttttgcaaatttaacagcagctttgatcacctctgcatgctcttctgtcgtcagcgtagagctctcacctgttgtacctgcgataatgatacagtccgttccctgattgatctgatactcgatcatctgctctaatctgtcataatttacttcctcattgtttttcattggtgttacgattgccacaccggctcctttaaaaatagacatattaataatcctcctggttcctgtattatgatacgttaggatacactgctttgtgcacacggtattttatttattcataggacgtaatttccctatgaattaaaaaaaccgactctgatgagccggttcgtaaattctaatcatatgtattacccagtatatgtcgaatccgatagcgccccatctttctgccatttcagcttaagatgacagtcataaggttctttaccttatgcccaggaacatatccgcagcaaatatactccttcggcgttctttccttttatcctccatcctctgcttctgccacatccggaaaactactcttaaagcacgcaacctctatcaagcaatatgtatcttttagcaatcatagcaccatctatttctactgtcaatccaattcctctaaaaaatcaattttgctgacggatacttcgtatgcaacccttttttccgtctgcgtctccgataattttttgacatattcgcggctctggatcctgccccagatctgcacatgtccgcccacatcaaaaccggaggcaaatcttgcatttcgtccccagcagatgcacggaatgtaatctgattttccataagagcggttcacagcgatcagaagatctgcgatctctcttccaagcggtgttttccggtaaattggctccttacatacatagccgtctaaaaagatctggttgctctttacctcatcgtcaatctcgtctaaaaattccagttctctcacaaaaacggaaagtacaagccggtttttcttttcctcgtgccggttgaatgagcggaactgtcctgtcacataaatattctgtccgaccatgtcctcattgacatcgatcaatcgttccgaaatcatcaatggtatgtaatccatataattgctgagacggttgactgccacatcgaccatataaaatccctctccgtacacttcgtggctgaaccggaaatccgatacaatctcccccacgatcgacacctggttgttttcaaacattttatctgccatgaatattctcccttccttgcggtcatacacctatatttttttgtgcgttttttcttttcgaaccgtttctgcccggtatgacctgcctgacataatatttttaccatgtatcacattcaaattttcatggaacatgtcgataagaaaacgaatgtaatgacaacttttgtcaggtttttgaataaaaaaatattgcagaattccacaaatatgataaaatatataggttggttttttaaccttatgttacagttaatacatttcacacaggaaagagagattttgtatatgaaaatgaaacgtgaagatgtccgtaatattgccattattgcacacgttgaccacggtaaaacaactctggtcgatgagctgctaaagcagagcggcgtattccgcgcgaatcaggaagttcaggaacgtgtcatggactccaatgatatcgagagagaacgtggtatcacgatcctttcaaaaaacacagccattacctataaaggtacaaagatcaatgtcatcgatactcctggtcatgcggactttggtggtgaggttgagcgtgtccttaaaatggtaaacggtgttatccttgtcgttgacgcattcgagggtgttatgcctcagaccaaattcgtactgatgaaagcattagaactttctcttccggttatcgtatgtttaaataaagtagaccgtccggaagcccgcccgaacgaggttgtcgatgaagtacttgagttattcatggacttagacgcatccgatgagcagttagactgtccgttcctgtttgcatctgcaagagacggttatgccgttcgcgagatcggagatcttgtaaataacaaaaaagatatgacacctctgtttgagaccatcattgattacattccggctccagaaggtgatccggatgcaaacacacaggtactcatcagtaccatcgattacaacgagtatgtcggacgtatcggtatcggtaaagtcgacaacggatgcttaaaagtaaatcaggaagctgttgtggtaaaccatcatgaaccggacaaacagaaaaaagtccgcatcagcaaattatatgaatttgacggcttaaataaagtagatgtcgcagaagcaaagatcggatcgatcgtagcaatctccggtatcgcagatatccacatcggagatacgatctgtgcaccggaaaatccggttgcaataccgttccagaagatttctgagcctacgctttccatgaacttcatggtaaacgacagcccgctcgccggacaggaaggtaaattcatcacttcccgccatttaagagaccgtctgttcaaagaattaaataccgatgtttctctgcgtgtagaagagacagagagtccggactgctacaaagtatccggccgtggtgagcttcacttatccgttttagttgagaacatgcgccgtgaaggttatgagtttgcagtcagcaaagcagaagttttataccacacagacgagaacggcaaaaagacagagcctatggagatcgcttacgtcgatgtcccggatgagtttaccggtactgttatcgataaattaagccagcgtaaaggtgagcttgtcaatatgaaaccgatcaccggcggttacacccgtctggagtttaatattccatcccgtggtctcatcggttaccgtggagatttcatgacagacaccaaaggaaacggtatcatcaataccattttcaacggctatgctccttaccgtggtgagatcgcataccgtaaacttggttccctgatcgcatttgaatccggcgaatccgtaacttatggtctgttctctgcccaggaccgcggtactttatttatcggacctggcgaaaaagtttatgccggaatggtcatcggttcctgtgcaagagctgaggatatcgagttaaacgtatgtaagaaaaaacatcttaccaatacacgttcttcttctgctgatgaagcactgacactggttccgccaaaagttttaagcttagagcaggcgcttgacttcattgatgtcgatgagcttcttgaggtaacaccggagagccttcgtatccgtaagcgtatcttagacccaaccttacgcaaacgtgctaatatgaaaaaataatcattttattctcatgaatcacaaaaagatgatccgcactgttatagttacggatcatcttttttgttttatgctggcaggctcatctggaaaatatagcatatatcgttttcacggctctttttccatccctgcatcataaaatgcccggctgttctttccgtttttctttactttatacattgcatgatccgccgcagcgatcacttctgtactgttctttccatctttcggatacaccgcaatgccgatactcgatgccagatactgctctccaccggcaatccgataaggtattttaaatgtgtctaaaatcttcattgcataggaatctatcacttctttctgaccgctttgcacaattgcaacaaattcatcccccgccagccggtaaacctcgaatacgtcatccaccagtgctccggcacgcgcagccatttccttaagcaccgcatccccttcgttgtgtccatagacatcattgatccgtttaaaattatccatatcaaacatgatcagaccaaacggttctttttccctgatccggtactgtaaatcttccataaacacacgccggttcaaaagtgaagtcagcgcatcatagcgcgctataaaatttaattttttattgagcgagctgatcgtatcgtttacttttcttttatgcatattatcccggacaagccagatgataaacaaaaccatgatcccaccgatcacagatgtgatacggatcacttttccatactgctccataaaagtttcttcgtgattgatgatctttgcatcatccggtaacatgctgcgcgaaattccaaagcgcttcataaccgtctcatcaaagcaatatgtcatcggtgaatctgttatgacatccatattctcacatggttcaccatttaaaattttaagagccatctccccggcgatctcgcccatctcttcatgggaaacgatctcacctccaagcagtcctttccccatacctatcgatataccggaaaacatgggaatatgtgcccggctgctcagcatctggacagactctgccgatgcataaacatttccatccttatcattactgcataaaatatataaaagaatcgtactctcatcgaaagattctacgctcttaatcagatctttctgtgaaaattctgatgcattgatatcactaaactccagatccggaaattcatctttgtaagaataaaattcctttcttgcactaagcccggttaccgtattgtcaacaattgcaacaatatgtgctgcttccggatatatctttttggcaagtgctatggtatttccataagtctgattttctatgattcctgttacattgggattgtaatccatcgccagcgcttttgaaacattattgaccccttcaaaaacaatcggcgtattcccaaaaattttccgatatacaagcacaaaattatacgccgcatcatctcccactatgaccacgtcataagctggtacctggcttaaataataactcaggctcttgtaaaataaatgtacattttccgctgtatcgacattcttagtatccataaacttatagtctatggtcacatcatcccccagtgattttctgattccatcaatctgctgtggaatcgtctcccatgcataggaataggaactgatgaacagcacacgtcctcttcctgtttcttttgcattgaccggaaaacttccccctatccatagcagtacaaaaagaagtgctgccaaaatacagcctttctctactttatgatttttcatatgtgtcccccgatttttatgcagcataactttcattctgtatgtttagattttaatttcttcaaactataatctaaattttccacccaattgtataaaaagtcaacataattcatcattttttgtcacttttttccaatttttctttctgttttttcgcccgctgtaaataattttccttcatatcaaaagtcctcttccactctttcgttcctttcactttgtgcacttcggaacggtttttatataaaaaccgtgtcagattataacagtccacccaaatctcatgcccactctccctccactcctcatcaaagatcagttcgagtccgtaatgaagatgtacagtatctatattgttgacattttcttttgtactgtaaccggtgtgccccatatagccgatcacatcccctgccgtcacaagatctccctcttttaattttgcctgatatgggtaatcctgacgcagatgcgcataataataatatctctttttatccggactgcggattccaacacgccagcctccgtactgattccagcccagagcctccacatatcctgtttcaatgcagatcacaggcgtaccgatctgtcccatcatatcatgtcctaaatgctgtcttttatatccatagcttctcgacacgccaaaatcatcataatcactgtacggaaatccctttgcgatcggggaaaatgctttcagtccatattttttcacatagggaccaccctcactctcctgtatctcatactcgccgaccagaccgccaagcaccgccgaatatgcctccttataataggaaaaatacttgagcttctctgccgcctcatcaaatgtcagctccttatttttcactttctctgccgcctcattcagttctgacactgctgtcgcgccaaactccccgccatttttcgctgccacataagaaagtaagtcgatccaatcgatatgcatttcacttccatatgtgtccacgtcacactcatatgccttgcacaacgcctcataagacacattaaaatccacccaccggatcgtcccgtccgatgtggcagtaactgttttcccccctgttcctgccgtattttcccataaaagaaaagcagccataagaaggatgactccctctaaaataatggctgctttaatacgctgacaccaggttttcctgcctgctgatatcatgttcatgacactcctcctaccctgccattcttttccattcattatatgaggcgggatgaaaaataatcatgcatttttattatttactttcctggcacgcactgcacattccatacaaaattgaatttttgcactgcagtttaaacccgtgatcttttaaaatgtgctctgagatttcatccataaactcacattccagatggatgatcttcccacatttcacacactgcagatgcagatgttcctcacagtggtgtcctaattccacatactgatataccgcctgattgcccttttcggcaacgtatttgattaccgtgccatcctttgccagcttatctaaataacggtagatcgtcgtgatattgacctcacagtcctgcgctttcagataatggtcgatatccgccacagcgactgtccggtcactgttcttctttaaaaattccaaaatctttttacggctgatcgtcgcataaccacttcccggcatattcctcgtcccttcctgtttcctttatttaaaacacaatcccacacactcttatgataacaccccagaacacgccaagtccatacaaagccgcaacaattccggcattctgcttccagtcacggttcagacggaacaaaactaacagtccgacgccggcattcacaagcagtccagacatcatggcgcccgctccgatgataccgcctaaataaagttctgtgatcacaactgaggatgcacaatttgggatcagtccgacaagtgctgctactgcctcacccacaagcggcattgcagtaaaaaagcctgcaagtgtatcttccccgatgaacccgatcactacatttaaaaggaaagaaatgatcagaatatacgcaaaaatctttaaggtatgtttgaatgcagaccggaaaatgccgtcctcgcagctgcagtgttcttcctcacataccacatggatgtccatttctttttcatgctttttcatcacacccacatataaaaactccacaacaagtccggaaatcataccaatgatgaccttagctgcaaggatcttaacgatcacgacaggtgcaaccgcctctgagatcatgatcggaagcatctcatcggaggtcgataagaaaatcgcaagcagtgttccgactgtgatcacatgtcccgcatagaggcttgacgccgctgcagaaaagccacactgtgggatcactccaagcaatgcaccccaaacagggccgctttttccagcgctcctgatacggttctttgcctttcctccagtcttatgctctaactcttccatcaaaaggtatgtgataaacaaaaacggaagtaattttacactatctaataaagtatctaaaataatatctaacatattgcgccccatttcctacatgacatgtatgtcgatttcttacatttgcgaccaattcgtatttgcaatcagtttgtatttgcaacttgtttgcatttttattatacgcagaaa

SEQ ID NO: 5157 - DNA, 23801 bp, Unknown
  gut microbiota DNA sequence
atccatgaatccttttttctttttcggcttttctgctgtaccagtgccctctgctgacttctttaatgtattaccggtaacttcatcaaacttacgcaatgcctcttttgcttctgcatttaaggaagccggaacctgaaccaccaatgtaacataatggtcaccacgcactgctttgtttcgcagagacggtacgccttttcccttcaggcggattcttgtgtctgtctgtgttcctgcttttacctcgtataagacgtctccatccacggtgttgatacgcacctcaccgcctaatgccgcctgagcaaaggaaatcggcacggtagaataaatgttcatatcctgacgctggaagatcggatgacgtgatacaactacctctactagcagatccccacgcggtccgccgttgatacccggttcccctttttcacggatccttacactctgtccattgtcaattcccgcagggatcgatacctggattttctttttatttgagatatatccggttccacggcaatccggacatttatccttgatcatctttccggaaccaccgcagtccggacaggtctgtacattctgtacggttccaaagaaggactgctgggtaaatacgactttacctttaccaccacatttcggacaggtctctggtgtggttcccggttttgcaccggtaccatgacacttctggcactcatcctttaagaccatctcgatctctttctcacagccaaatacagcttcctcaaatgtaatacggacactggtgcgcagattctgtcctttcatcggaccatcgttgccacgtcttctggatccgccgccaaagaaatctccaaaaatatctccaaagatatctcccatatccataccggagaaatcaaatcctcctgctccgccggcaccaccatcaaatgctgcatgaccaaactgatcgtactgttttctcttttctgcatcactgagcacagcatatgcttcctgcgcttccttgaactttgcctccgcttccttatctccagggttcatatccgggtgatactttttggcaagcacacggaacgcttttttgatctcagcatctgttgccgttttactcacgcctaagacttcataataatctctcttatctgccataacgttttcctctctcaaactgcatacagggtttccgggaaaacccccggaaaccccgttgtatttttactgttttgcgatgattaaacttccttgaagtctgcgtctacgacatcatcatctgcggaagatgcacctgcctgtgcgttgccgcccataccgctcatatcaggacctgcaccagctgctccctgcgctgcctgagtctgctcatacatctttgcaaataccttctgcgcactctctgtcagtttttcctgcagggatttcagttctgttacatcagcgtctgtcatctcttctgcattctggtgtgcgtctaagaatgcttttactgcgttcatatcagtctctactgctgatttatcagccggatcaaggtttgctccaacctgatctaatgcctgctgtgtctggaatacgaaggaatcagcatcatttcttgcatcgattgcctcttttctcttcttatcctgtgcttcgaactcagcagcttctttgacagccttatcgatctcatcatcagacatattagaacctgctgtgattgtgatgtgctgttcttttccagttcctaaatcttttgcagatacatttacgataccgtttgcatcgatatcaaatgtaacttcgatctgcggaacaccacgacgtgctggcgggataccatccagacggaactgtccaagggatttgttatctcttgcaaactgtctctcaccctgtacaacgttgatatctactgctgtctggttatctgctgccgttgagaagatctggctcttcttggtaggaatcgttgtatttctctcgatcagtcttgttgcgataccacccattgtctcgatggaaagtgaaagtggtgttacatccagaagtaagatctcacctgcacctgcatctcctgcaagtttaccaccctggatagatgcaccgatggcaacacactcatccgggttcaatgtcttacttggctctttgcctgtcaactgttttactttatcctgaacagccgggatacgtgtagaaccaccaactaataatacctgaccaagatcagcattggtaagtcctgcatctctcatggcgttctgaaccggaatagctgttttttcaacgagatcatgtgtcagttcgtcgaattttgctctggttaagttcatatcaaagtgtttcggtccctcagcagttgctgtgatgaacggaaggttgatatttgtggttgttgcggaagaaagttctttctttgctttctcagctgcttcttttaatctctgaagagccatcttatcggtagaaagatctacaccttctgctttcttgaactcatcgatcatccactgtgtgattctgttatcgaaatcatcaccaccaagatgtgtatcaccatttgtagataatacctcgatgacaccgtcaccgatctcaatgatggaaacatcaaatgtaccaccaccaaggtcatataccatgatcttctgctctttctcgttgtcaagaccataagctaaagctgctgctgtcggctcgttgatgatacgttttacatcaaggcctgcgattttacctgcatctttggttgcctgacgctgtgcatcgttgaagtaagccggaactgtaataacagcctctgttactttctctcctaagtatccttctgcatctgcttttaacttctgtaagatcattgcagaaatctgctgtggagaatactgtttgtcatcgattgctactttataatcagtacccatatgtctcttgatagaagatatggttttttctgcgtttgtaacagcctgacgttttgcaggctcaccaactaatctctcacctgtttttgtaaatgcaacgatagatggtgttgttcttgcaccttcctgatttgcgataacggtaggttttccaccttccataacagctacacagctgtttgtcgtacctaagtcaataccaatgattttactcataatgatttcctcctcatctaatatctatggaataattagtttgctacttttaccatactgtgtcttaccacagtatctctgtacatatatcccttctggagttcttctgctactacattctctcctaaggtttcatcctccacatgcatgactgcattgtggaaattcggatcaaattcagcaccgaccgcctcgatcggttttacgcctgcttcctctaatacggtaagcatctggcggtagatcttatccattccgacaacaaaagcatcttctttgttatcttccggaactgctgcaagaccacgctcaaagttatcaatgaccggcaggatcttttctacgattgtttttgctcccatatcgtacatctgtgatttttctttctctgtacgcttacggaagttatcaaactctgccatctgtctttttaccttatcggtaagctcctcgatctgctcatcctttttgtctttcttctttttgaaaaaagatttctttttatcaggatcttcggaatccgcttcggaagcttctgcatcagcgttctctgctgtttcggctgtttcttccgtggatgtcacggtttcatcttctttggtctcggaagcattttcctctgtggaagattccattgcttcgtctaataccttttcatccatctctgacatctatgaaccacctttctatgtctgttccttatccttgtttaaaattccgtctaaagaattcttcaaggttttcaggttatccattactttctcataatccattcgtttcggtccgacaattcctatcgttccccgaacaccttcgcccaattcgtatgttgctgtcacaacactgcagtccttcatggtctgtatcgggctttcatttcctatataaacctgaattcctgtattatcatcatctaacaggttttcagttacaaggcttgctaactgctgtttctcctcaaatgtggagatcagctcacttgctttctccgagtcacttaactccggatatttaaagaaattggttgctccacttgtataaatgcggatatcttcatcctgtcccatcgtctctgccacggtatcaagcacatcactgatgatatcactgtggatgcccgcctgctcttttaactttgcgatggttccaaggttgatctcctgtaatgcaagaccgtttaaattcgcatttaacaggaaattcagttttaacattgtctcattgtcgattggctcactgaccggaataattttattcttgaccagattgccttcggtaacgatcgttgctaaaatctgttcttcattcatattcgataactggatgaactttactttattcttatgaaacgtcggtgctgtgaccatcgtcgcataattggtattgttcgccagtatctttgccacctgctgcagcacctgatccaccttctccgtgtgttcgatgacgaaattcttcatctcattcacttcacggtctttctcttccatcagatgatccacataaaagcggtatcctttgtcggaagggatcctgccggccgaagtatgcggctgtaaaatgtatccaagttcttccaggtctgccatctcattacggattgtcgcagagctcagattcaaatcggtatacttggatattgttcgtgatccaaccggttcgcctgtctctaaatagttgcggatgattgcatcaagaattttcgtttttcgttcgtctaattcgaattcctcgtccattctcttctccatctccatactctgtaactttctgtaagaatccggcatctgcctctgatctcagttacctttttctatctgttagcactcattattatggagtgctaacatctatgtacttaaaatagcaccatcatattcttttgtcaacactaatttttataatttctgcggttttatattttttttataattttcctgtttagacctttttcttcttatatatatgaggatcagaccaatcagaacactaaccgtaacaaccaccatataacgtaccagatgttttcctgcatccagtcccatgcattccatgatctttttataccagaaatataccagcatatgtaaaaggaaaatttccgtcgagagctcacgcattatttttgcggtcacatccattctctcactcaccggaaaaaaggctgcagccaggaaaagatttgcagtgacaagcggtgtcataagatacatatcatgcgatgactcgccgatcttctgtgtgacgatccattcttctaacatcatcagcacaagaaaaaataccgtataccatccatacgcactttttcggatccggtctgcctttacacggaagagatatcccatggtcacaaacgggaatccgaaaaagaatccgtttcttgccgtagcaaatacagaaagataccattggatctcattcgcagccggtaaaacggtatcgaatacatgacggtaagtattgtggaaaactccagtcagatacaacagcacagccgctgcaacgattcctttcacattccaccgaaaacgtgttaccaacagatacaaaaacagcaccgctgcaacagtcgcaggcagataccagagctgtatgtaagatcctatcaggaaaaatcttcttgcaagttctaatatgtttccggcagcacttctttttttctcccagaagcggtcaatgatcggtatcagatataacagactccaccatacatacatctttataatatggaaaagatatttttttaccctgtctttgtctgttattttttctccgataaaatagccggtacacacaaaaaagaacggaactgccatacggcagatcacctgctgaaattcgtgtgaaaataccggtgcgatttcctcaaacggaggaatatgaatggcagcaaccaaaaatgctgccacaaattttgagaaatcaagtgctctgtattcctttttttccgatagatatatcgtagacatcccagatcctttccttattctgctctattccatttctttttgttttttccttccgttccgatacctgaaaataacgatcccgatcaccgacaggattccaagtccgctcaaaccagcacctgtttttaaatacggcgtacagtaataaaattcgatctgatgtgttccctccggcacatcaactgccatatacatcgtatccacctttaaaatctctgtttccacaccatctatatacgcccgccagccgctactgtacggaattgtcatacagagcagtttttcctgatctgccgtaagggtaccggatatgtgatttgtatccatgacaacatcttttaaaatatcctgtttcagacttttcgtccaaccggcaatctgttttaccggctggcagacaatctgcatctcatcaaaccggtaagttcccttttcatgaaaggtcagtgtgatctcatctgctttttcatcacgatatccggcattgatcagatagtcatccacaccactgtaaaagttgttttttctggtcaggaatgtgatcattttggtaatttttccacaggtcacatcaatgtgcagacggctcttcgactgtgttaacgtctttccctcctccgaaaactgaagcccttttaatatgaagtaagtttcactctccggtatcccctcaaaggaaagtgttactgacgctttcttttccgtcgcagtaaatccctggtcggtcagttccacattgtgcatatctgtgatcatataagaaatatcttcatccgtaaattccgtttccgtctttgtatcagctaacacagacgggatcttctcatcctccacgacaatcccctgtaacagtgcctgctgttttttcgtcacatccagttcttcataagtgctccgtggaatcaccgcatcacttgcaaatccaagcggcagtaccgaatcattttcataagcatcgcattttacctcatactgtcccccggcgcctaatgttccacggttgatgcagacgttataaccatacgggcgcagtccgctgtttctggacggcaccacataataacgcacgccggaaagcacctccaacatcgtgcgcgcatcaaatccggaataacagaaatccctggtctgattgatgtacatttctctttgaaactggttgatatccgggtttgcaagactgaaataataggaggtaccattgattccaagctgcatcgccgtgtttttccactcctcagactgcagggactcatagcggtatgtcgtatctttcgcatgatttttcacaagactacccgcagcatcttttgtcagcatggaaagtgcctccccctgcgtggcaaattcttccacataactgcccgcctgtggcgcatattctgcccatccctgatagatcagttcaagcatcaccaccactaacaatgccgccttaaaaacaaatttttctttcgtctttttcccggttccgacaatgaaaactaacagcacggaaaataataataatgccactaatacatactgtttctgatgctttccaagcacctccaagcacaggcagatataggtgatccccgcccagaacagtgcaatttttttcttaaaatgcatctccatcatctgaggatacatttttaccgcgataaaagacacaagcatggagtatgcccacatatagcggttgaccacataactgcctccatttaacatttttccggcaaacgggaacaacagcaacagtgtcataagtacaaatccggcacgcagccccctgttttttttgccgccaaagagaagtaacaacaccgctaagaggacgattcccgtatatccaagttcactccagtaggtcgaacctccgatcagaaagccatacagtaatttccggtaataagataacggatacattatcgaaaacgtatgctgcgctcctgcccttcccgtagacagtgtcatggcaacaaccgggagtaatatgacagaaacagatgccagtgtcaccagtgagtatgccacaaaacgccatacccagtaccataccgtctttaaaaccggttttccaaataacatcagataacgaagcagagcatagatggcaacaaagatacagatcatgtatgtaaaataaaaactgctgaccgtcgctaccgcaagcatccccatatataaccatggtttctgttttttataaattttatccaccccgaccagaatcagcggcaggtagatcatcggatttaaaaaatacggatgccgcaccgcaataataacccaaaaacagaaatcgtacaccattgctccaagcagtgtagaatatggtttctgtccatggtatctgcagtatgcagaaaacgcgagacctgcaagatatattctcaccagaaccatcgtattgtaaaagagttccatatatttttcatccggcacgaacaccgataaaagattgagcggatcgccaatgacataataatgaagtgtcgtcaatacatctgatccaagtccaatctgcatatcccagagagggactgagaccttatgttccgtgaccagcgtatccaggatcgataacagccaggaacggtaataaagcagcgcattgaaatgctgctgcaaaccgtccggaacccatataaaactctttttatttatgataaatacggagaacactgcccccgcaatgattgcaaaacaaacggtatatgccagaaagaaccagacttttttactgacattttcctctttattccttaggaatctcattttttaatcctcacatacaaagggaccaaagcccctcgtctttagtcccccctttctcttacatatgaaatccatatttcaaaaaattgtataacctgtcagtctgccactgaaaattacgcgcgccaaaactatcaaaacctgcgatccacaccagtgtcaaaacaaagtaccatggatggctcttcacacgctcctgcatttttccaaatgcataaattattgatttatctttttgagcaagcaaaaataaaaatacaaatgttggcattgccatcaatggtgccagatgtcttccccagtccacatgaatcacgaacattggtataaaacaaatatttaccagagcagcatacaaatatggtgactggatcaattttacttttttctgtctcaaatcaaaaaatacatctttccaaaccatcagatataaaataagcaatggcgacatcaacaacaatatcagcaatagatggcggattggatcttcatttccgtgaaaaaatacggatgtcacctcgtcaagctgatatttcatacttccaaaatactcaagctgaatcgcaaaatccgatacctccaaattagtacgggacttaataaatgaaactgtctcttctacactgtcaaaattgattttagtaaaaaactgaaagtaaatcgctgccgcaacttctattgcacccgaaattaccacacccacaaatcttttcttatgtaaacgattctccgcaaatgcatcataacaaagtactgtaaatgtcaagggatagtataaaaaagcatatccctgatgaattgcaagacctgttacccccaaaacagtgataagtatcgcttttgccacataattttttatacacaaggctgccagtactgtcagcaatgcgaccaaaagcatgtaaacatcaaatcttcccagattatcttcattccacacatatgcgattgaaaacggggctatcacatatgctgttactactccatatataacatccttatgtgcgtaatctgcagcgagtgatcttcgtatcagttgtcctaacacaaccgccaaaaccagaatcgtcaacatgatgccaattcctacatatttatacgccacggtaatatctaaatattccccataaaacaacctgtatatacttccaatcagaagccttgaaccgtttcccatggaataatccattgcatcccatgcagttgcccatgtgttaagatccaatgcacgggtggataaaaaacgaatcataattacaccaaaaatgattgtttcataagagattttattccatattttgtttatcttatgcgacattcagcactcctaccaattaaacttctctgcgaaataagcatccagatcctcgatcttaatacgctcctgctccatggtatcacggtcacgaaccgttaccgcaccgtcattttcagattcgaaatcgtaagttacgcagaacggagtaccgatctcatcctgtcttctgtaacgttttccgatatttcctctgtcatcaaattcacagttgtatttgtgtgaaagctgtgcaaataccttttctgcgccttcatttaacttcttggataatggaagcacaccgatcttaaccggagctaaagccgggtggaaatgaagaactgttctcatatccggtttttcttcggttccgatattctcctcatcgtaagcagcacataagaatgctaaaacaacacggtctgcaccgagtgaaggctcgatgacatacggaagatatctttcattcttctcatcatcaaaataagtaagatcctgaccggaagtctcctgatggcgtccaaggtcataatcagttctgtcagcgataccccagagctcgccccatccgaacgggaataagaactcgatatcggttgttcccttgctgtaaaatgcaagttcagccggatcatgatcacgcagacgcatctcatcctctttgattccaagggagatcagccagtcacgacagaagcctctccagtactggaaccactctaaatcagtgccaggctcacagaaaaactcaagctccatctgctcaaactctctggtacggaatgtaaagttacccggtgtgatctcgttacggaaagattttccgacctgtccgataccgaacgggatctttttgcgggatgttctctgtacatttttaaaattaacgaaaataccctgtgctgtctccggtcttaagtatacggtattttttgcatcttcagtaacaccctgaaatgtcttaaacatcaggttaaactgacggatatctgtaaagttatgtttgccgcaggtcggacatggaacctgattttcttcgatgaaatcacgcatctcttcctgtgtccagccgtctacggaactctttaactcaatttttttctcttccgcaaaatcctcgatgatcttgtctgcacggaaacgctcgtgacattctttacaatccattaaaggatcagaaaatcctccaagatgtccggatgcaacccatgtctgcgggttcattaagatcgcacagtccacaccaacattgtatgggttctcctgaataaatttctgccaccatgctctttttacattgttctttaactcaacgccgagattaccataatcccatgtatttgcaagaccgccgtaaatctcagatcccggataaacgaatcctcttgattttgccagtgctacaattttgtccattgatttttccataaataattcctcacctttctataaaatggcagtaaactgcctcttttgtatgcttacttataaataatgtatgtgtagacatctgtttcaaatgccccatcatcttttacataagttgtatcgtcattgacgtctgtgtcagacacctctgttgacccgccaatactctctgttccatcagcgatattttcatctgaatcactctcatcggctgtactgccattgtttaaactgtaaccatcccggatggacacactgtctgttccggtcagttttacattctcacttgaaacatagcagattgtaccgtctactttcacatctctgtttgccttgatgatgactacttttaaatcttctccggagtaaatttcctcctttgtggcggttcctgtcacctttccatcttccacactgacaaaatctgtcttgaaatcatatcctgctgcgagtgccttaacaacttttccctcatagagttcaatgccattaaatcctgtgtaatcttccggcgtcttatacttcatcttaagtgttgccgtaccgtccttcacagacagattttccagtttgaccgcactctttccatgctccccggtatatgtggaaacggcatccgtcacataatcctttaactccgtctcatcataataatctttgtctaacgtttcaacatccaccgaaagcacggttccgtttttctgtacatacaccgtatccgtatccgcatccagagattttccacatccagccagcatcgaaatgccaatcagtacgctgatacctgccatacatgcttttctcatttttataattctccattcgtcttacatatccaatgttttacattatactatttcccattcccgatttcaaccagtaaatagtccatccaacattttcagcgtctgaaacgaatgatccagataaactgcacggtaacttttcatgatcgccagcagctgtcttaacacactgtcactgacggaaaaagtatacagtttttccacccttgccgaaatgatgtactgcattgtgtaaagcgtcgactcttccagtaaaaacctgccggattcctccggtgatggatcctttttttcacacgtttcacagatacatccgccacgccttgtcataaaccagcgcaaattttctttttccccacatctgacacaggaaaaaacgtttggcgcctcgccgttgacagccatcgccttcagttcaaaaataaagcggaccagcctcttatcataggcagcgctcgtcaatgccctgagtgactgataaagcagctttaacatttcccgttcatcattgttttcctgacagtaataatcggcaaattccagaaaataacacccataatatgtagcttcaagttcttcctgaacttccctgaaatagttctgaatggacgccctgactacggtgtaggaacttcttccctcaaacatttcaaattctccaaaggaaaacggggttgccgcagcaacaagtgcactgtttggtcttcttgcaccctttgcaaatgcggtgatcttgccccgttcctttgtcagcagcgtgattcttctgtcataatcgccaatcggcattacctttaagaccatcccggtcactacgatattctgtcccatccggtctgttctcccatcctctccctgtggtatcaaagctgccttcgtgcgactctttgtattttaaataatcagttactcttcctgttatcataaaattgttccaggcttcatccatggtctcatcctcccatcatccatcacttgataatgttaggatttccgcagacagcttcgcttataccagcaaaaaaatggtaagtttagatctcatccttgttataaccaaaattcttcatcatggaatcgctgtcacgccagtcttttttaacttttacccaaagttttaaattgacctgttcctctaacagtcgttcgatctcataacgtgcgtttgaaccgatcttttttaacattgccccgccttttccaatcacgatgcccttatgggaatccctctcgcagacgattgtcgcctcaatgtccatgatgttctgtcctttccgctgtttcatgcggtcaatgcagacagcgattccgtgcgggatctcatcatccaatgcatgaagtgccttttcacggatgatctccgcaacgatcgcgcgctccggctggtctgtgattgtgtcctcatcataaaactgcggtccgtacggcagatatttaaagatcatgtcaagtacggtatcgagattctgtgcgcgcagggcggacgccggaacgatctcggcaaaatcatatactttgcggtaagtatcgataaattccagtatcttgtcacggctgaccgtatccaccttattgatgacaagaatcacaggtgtttttgtcttttttaactgctcgatgatatgctgttcccctgctccgataaagttcgacggctctactaaccagaggatcacatccacttcatttaaagtgtgttctgcagtgttgaccatatattcacccagcttgttttttgccttatggattcccggcgtgtccaaaaatacgatctgtccgcgttccatatccgtatagacagtctggatacggtttctggtggtctgcggtttattggatgtgattgcgatcttctgaccaatcagatgattcattaaagttgattttccaacgtttggtctgccgataattgtgacaaatcccgatttaaaattttctttcattcgtactccattcccaaattattcatataaatttttcagctgcataaacatgtcgctctgactctttaagttatcttcgtttccgatgacacagagatttttttcttccagcacggatgcgatcagatcctttaagccacggatatcctcatctgttgcaccgatcacctgatcgcgctctttctggatatccgcaaaatccagtccctgtaaatatgcggtcatggaacgtgctcccttcgcactcggattcatcggcgtatccatatcactgatcgtaccaatgatgtattttgtcatctcacgctcgtccgccttaaaatcggcaagatactgcgggataccgtcatagatctcatccgttttctttaagttcggatcacggtaggaaacaaaataagtatctccattccgcatatagctgttcatacatccataggctccgcccttgacacggacattgatccagagataatcatatcccataatgacttttaaaatgcgcaatgcaccgtgatacgaaaatccgtggcgcacatagttaccagctctcgccacatactgcacctgggaggcatccataaatccctcatttttcttttctaaatgaagctctggcagactccgctctttcacgatttccttcgacggatacagattttttaacaggaaagcgatctgtgcttctaccgcctgataatctgcctcttcgcagacaacactgacgatcatgcgctccggtacaaatatcgtctgtaccattttctcaagctgtgcgatcagtgcatcttttttctcattaaaatgttcatctaaatcagcgaccagttcatagaaggaaatgcctgcggttgcctcctgataatatgccgctcttgagaaataagacagcgcacgcatggatgccaccgaatgtccggaaccgtcaaatgccgcctccacccttgaacgaagctgcgcaatgatctcactcaggcgcttttcatcagaaatctttgtcgtcattatgatctcacgcaaaagatccatcgcctggggcagctccgatgcaagcgtttttacacgcagttcaaacataaactgcatatcctccggcttcttcacatgcggataaacaccacagcttgcggatattccaccggtgtggatgttgatctcatttgccagttctgaaaatccgtaccgctctgtatccatatagccaaggatatattttaaaattccaacatacggcagatctttgatctccatatcacggatatcaaagaggatgcgcagataatcaataccatttgaaaacatttcatggtgtacgaccgtcgtgtcaccgcattttttcatcgtattgtaaagcggtgccgcctcacgtttcatatcctcacgttttaacatcggaatttttgccaaatcttcctttggtgaaggctcttcctgatactgttttaaatgtttcgtgtctgcgataagctgcttgatctcctctttactcaggctgtctttatatgcagcaagtttctctgccagtgtctcttctctttttgcattaagacctctctccggctcaatcacaaccaccgacgcatgcggattgtgaagcagatatttttcaatcaatgtttcaaaatatccggtctcaacctgctcccgcaggaaacggtaagtatctaatgcctccacatgcataaatggctgcatgtcatcgtaaagccagctgtccaaacactggatgccgtataatagtcccttcgggaattgtccgaaatccgcttcacgatagcggaactctgacgcactgatcccggcaagcagtgctttcttatccacgccgtcttttacctgacggtttaacacatcctgtatcgtcgcaagaaacttttctttatctgcactgttcgcattttttgcaatgatggaaaataccggctgcatggtactgctgtcataaccgccaacgatatcttttccgatgcccgcgtcgatcagtgcctgttttaacggagcccccggtgcaccgagcaatgcatagtcaagcacatcaaatgccagataaagttttctatctaaaatgtcccccacaaccagattataagaaagataggtattatcttcctccggttctgcggaagagattgggtatttcttcgtgatctccactggtttttcaaatggcttctgtgcctttactgtagagtcaagttcaatttcctcataatggcttaaatattcctcatccatccagcggagtttttctgccacatccatatttccatacaggtaaatataggaattgcacggatggtaatatctgcggtgaaaatcaaggtaatcctcataggtcagatccgggatacgttccggatctccgccggactcgttactgtaagtgttatccggaaacagggaatttaaaatttcccgctgcagcacatcgtcagctgaggaaaaagcacctttcatttcattatatacaacaccgttgatcgtaatcggcgcatcttcgctctcaagctcataatgccagccttcctgtttaaaaatctcctgatgtttataaatattcggatggaataccgcatccatataaacactcatcagattctgaaaatccgtatcgttgcagcttgccaccggataaatcgttttctccggataagtgatcgcatttaaaaatgtatttaaggatcccttgaccagttccacaaacggatccttgaccgggtatttatccgaaccgcacaatactgtgtgttctataatatgtggtacacctgtggaatcctccgccggagtgcggaatccgatataaaataccttattatcatcatcatttgagattacagcaattcttgcgccgctctttttatgacgtaaaacgagcccttcggatttcaaatcgcgcaaagggcactgctctaaaacttcatatgcatccaaatcagtcagtttcatcgttttcctccaaaatatgatcttatgtctagtatattatgtgcaaaaaacagcacataatccaattcgccgttcgtcaatcaagcaagcatgttgactcacttgcgctcattatatcatgcgcaaaagcagcacatgatcgtgatctacactcgcttcgctcggcagtcttattatatcacattttatacaacttaaaaagggaatgtaatatttacactccctttttggtacttatggaatcatctgctgttatgcgatacggcttacattggcagcctgaggacctttttctccttcggtaacctcgaactcaacacgttcaccgtcttttaactctttaaatccatccatgttcaatgcggaaaaatgtacgaatacgtcatttccctgctcgtccgaaataaatccataaccttttttggcattaaaccattttacagttccctgctgcataactctttaaaaacctcctaaatacataaaataaccattcaacagaatcctctttgtcatctgttttgcctaacaaatcaaaattagcatatctcacttattttgtcaacattttttagaaatctttgttaattttgcacataagagcgttatgactgtttcatggtaactttactggttccgcagcctgtaaacataccactcatatccgtcacgtttgaagtgttaaaattgctcacgttcagacttgtcaagctcctgttttactgtatttgcgggttttttatacacaaaaaaagcggtacatatacacatttcgtatgataatgatgttgggggcaaacagtgcattcacaacataacgactgacaaattgcacaaagccgagactgcttttgtgactttgggagaaaattagtaaatcttagactgcctggtaatacacagtgatgttctgccacggatggcagaacaaggcagcatcgagtcatggaggactcgttgttgccgttcacgtcattctgagaaaacctgactcaggcaggcttagattttcttattttcgtacaatggaacaaaacagacacggctttgcgcaatttgtcaatcaagaagtttaaatgcactatctgaccccaacaccatgataattgcaccgttcttttctccctgtcatttactgtttgatctgcacatccatctgaggatatggaatggaaatattgtgactgtcaagcgcatacttgatattctcggtcaggcgccaccttgcagaccagtagtcctctgtttttacccagatacgcacacccatgtttacggaagaatctccgagttcatccacaaatacaagaatctcttcttccggcagtcttgcctcctccgcttctgcaacagaatacaacacttcttttgcagttctgatatctgcttcatatgcaatgcctactaccagatccacacggcgtttctccatggtggaaacattcgtgatgctgctgttagagagtgtaccgtttggtaccatgaccactttgttgtcaatggtgagcagtttcgtatagaaaatggagatctctgttaccgtaccctctttcccgccggaatgttctataatgtaatctccgacacggaaaggttttaacaataagatcagcacaccacccgcaaaatttgaaaggctgccctgtaatgccagaccgactgccacaccagcagaaccaagcactgccactgccgaggtggttgcaattccaaacagtcccatgataataaagatcagtaccaggtatagtgcgtatttgatcaatggcagtacaaactgtctgacaccggtatcgacatctctgcgttccatggatttgcggaacatttttaagatcaggttaatgatcttgcttccgacaatataaatgataatcgcaactacaacctgaaacgcaaaattcaaaagatccgggatcagaccctgcagccatgtgcctacgattccagggttcttcgcaacctcctgtaagttttcctgcgcctggtttaacatttcgacggtctcagttgcatttgcgattccttctacattttctgccagcatatatggctcccttcgtttttattcgaatttgaattttaaaaaaatcatctttaggctatgaatgttgtgaacctgacacagattcacaacttcctcagttctttataagttttcaaaattccatttctcattttgtcctgctctaaggaatttccttattctaaggaatgaatgaacagaccgctgcggagcttcggctcaaaccaggtagattttggaggcatgagttttccggcatctgcgacggagaagagctctgtgatcgaggtcggatacatggcaaatgcaacggagcagtcttcctcacagcgtctgaccagttcgtccatgccgcggattccgccgacaaagtcgatcctgccgtctgttttcggatctccgatgcctagtaccggatggagtaaaagatcatgtaacagtgagacatccagacttttgaccggatcatccgccactgccgcaaggtcttcctccctgatcttacacaagaaccagtgtccttccatgtacatggtaaagctgcctttttcctgcggtctcttttcttcctgatctgtgatctccgtcacgtcaaagcgttttttcatttccttgtaaaaactctggaaagagtatccgtttaaatccttgaccacacggttataatccatgatcataagctggtcatccgggaataacacggacaggaaataattaaattcttccgttccatcatagtccggatgttcttctcttcgtttcaaaccgacttttactgcggaagccgcacggtgatgaccatctgcgatatagatatctgccatattttcaaatgcctgtgagaccgcagctattttttcgtcgtcatcaatcacaaacacgcggtgtctgatcccgtcctccgatataaaatcatactccggctctccctctttgacctgtgctacgattccgttgatcaccggatctgaccggtatgccaaaaaaatcggtcctgtctgcgcattgcagacgtctacatgatggatacggtctgcctctttttccgctctggtgttctcatgttttttgataacaccgtttaaatagtcgtcgatcgacgcacatgcggtaatacctgtctgcacgcgtccattcatcgtaagttcgtaaatatagtagcagctcttctgatccctgataaaagaaccatcctctaccatcccccacaacagatcgtgtgccctttcgtacactctgtcgtcatacatatccacggaaagcggataacccgtttccgcacggtcgatctttaaaaaagactccgggttcttttccacttcctcagttgcttcttttctgttataaacatcataagggagggcagcgattttagctgccttccctttttctggtctgatgctcataaacggtctgatatctgccatttttgctgcacctcattttttcttatgcgatagttaccatttttcttataactctctcctgtgccgatcccaggtaacaataaaatcttcgttttatgaacactctattgtcatatatcactgctgttttttctagcagatcttgcgaacctttaagacaccctctgtattctttaatttttcaagtacatcctccggaacagaagtgtctaaatccaaaagcgcatatgcataatcgccttttgatttgtttgccattccgtcaatattgattcctgcatcaccaaggatcgttgtatataaacttaacatacctttgacattgcggtgtaagattccgatacgtcctgcagttgtgcatgcccccatgctgcagtccgggaaatttacagaatggacaatattaccattttctaagtaatcacggatctcacgcactgccatgatcgcacagttatcttctgactctgctgtggaagctccaaggtgaggtgttacgatacagccctttgcaccaacagtcgttgtgttcgggaaatcagatacatatttgtgtacttttcctgctgcaagtgcatccaccattgcttcttcatccacaagcagatctcttgcaaaatttaatatgatcgcagttggtttcatcatagcaattgcgtctgcactgatcatttttttcgtagaatccagaagcggcacatggatcgtgatgtagtcacactcacggtagatatcttctacgttgctgatgtgcttaacacttctcgataagttccatgctgctgcaacagagatatacggatcatatccatatacttccattcccatatggattgctgcattggcaactaacacaccgattgcaccaagtccgataacacccaatttctttccggagatctcagttcctgcaaagttttttttctgcttctcagcggtctttgcaatattctcatcattctggttctctaagcaccagtcgataccacccacgatatcacgggacgcataaagcatacctgcaaataccagctcttttacaccatttgcatttgcaccaggtgtattgaatacaacaatacctttttctgcacatttgtctaacggaatattgttgactccggcaccggctcttgcgactgcctctaaggtatccggcagttctaaatcatgcattgcagcacttctgactaaagcagcctgtgcatcttttaattcatctactttctcatactgatctgaaaacagatccagaccgactgatgcgatcggatttaagcagttatacttaaacattatgcattctcctcctcgaattttttcatgaactctactaacttctcaacgccctcttttggcatagcgttgtagatggatgctctcataccgccaacggtacgatgtccttttaagtttacaaatccggcttctgttgcctcttttacgaattttgcatccaggtcaacatctccggttacaaacggaacgttcattaaggagcggtcctccggtaccacagttcccttgaataatttgctctggtctaagaaatcataaaggatcttagctttctcttcgttgcgctctttcatcacagaaagtccacccatcttctttaaccatttgaatacttttccgcagatataaatgccgtagcatggcggtgtattgtaaagggaatctgcatctgcatgtgtcttgtattttaacatggtaggtgttccaggtaaggtatcctccgtgatcagatcctcacggataattacgataacaacaccggcaggtccgacattcttctggacgccgccgtagatcacaccatattttgtgacatctaccggctctgacaagaagcaggaagatacgtcagcgaccaatgtatgtccttttgtattcgggagttttttgtatttggttccataaattgtgttgttctcacaaatatatacataatcaagatcatccggaatatcaagatcggagcagtccggtatgtaagagaatgtcttatcctcggaagatgcaagtttgattgcctcaccgtaaatggatgcttcctgatatgctttctttgcccactgacctgttacgatataacctgcttttttatttttcatcaggttcatcgggatcatggcaaactgctgggatgctccaccctgtaaaaacaggactttgtaattatccggaatattcatcaggtctcttaaatcctgctctgcctctttgatgatattgtcatatactttggaacggtggctcatctccataacggacattccgcttcctttgtaatccaacatttcatctgctgcctcttttaatacttcctccggtaatacagccggtcctgcagaaaaattatacactctgctcatcttaaacttcctcctctgatttatgattgttgtttttttgctaaatcctcaccggtaaatgaagaactgattgcctctcccggtgcaaccatcggccacaccttgtcatcacagttgatgatacaatcgatcaaaaccggtatttttgattcaagtgcttccttaaaagcctctttgaactcttcctggctggtcacgcgatatcctttcgcccccattgcctctgctaattttacaaaatccacaccgtcatcaaggacagttgcggaataacgtttttcatagaacagatcctgccactggcgtaccattccaagtacatgattgttgacgatcacttcgatcaacggcagtttttcgcgcgccgcggttgcgatctcattcatgttcatacggaaacagccgtcgcctgcaatgtttatcacctgtttatccgggttgccgatctgtgcgccgatcgcagcaccaagtccgtaacccatcgttccaagtccgccggatgacaaaaaggtacgtggatttttgtatttgtaatactgtgccgcccacatctgatgctgtccgacttccgtcacgatgaccgcatcaccttttgttgcacgatagatctcctccatcagatacggaccactaagtccctctttcggataagtgagcggatatttttctttcagatccatgacctctttgatccat

SEQ ID NO: 5158 - DNA, 627 bp, Unknown
  gut microbiota DNA sequence
gcgttaacagatgagcagattgagcgttattcaagacatatcatattaaaagaagtcggcgcaaagggacagaaaaaacttttaaatgcaaaagtgctgatcatcggagccggcggacttggcgcacctgcagcaatgtatcttggtgcagcaggcgtgggaaccatcggtatcgtagatgcagatgaggtcgatctttccaatttacagcgtcagatcatccatggcacagccgatattggaaaagcaaaagtaaaatccgcaaaagagacgattaatgcaatgaacccggatgtaacggtaaaaacatatcgtcagtttgtgacaagcgaaaacatcatggatctgattgccgattatgattttatcattgacggaacggacaatttcccggcaaagtttttaattaatgatgcctgtgtcatggcaaaaaaaccattttcccatgcaggaatcatccgttttaagggacagcttatgacctatgttccgggagaaggaccatgctaccgctgtgtattcaaaaacccgccaccaaaggatgcagtgccgacctgtaaacaggcaggtgtcatcggtgccatgggcggtgtgatcggaagtttacaggcaatggaagcaatcaag

SEQ ID NO: 5159 - DNA, 24531 bp, Unknown
  gut microbiota DNA sequence
aagactacaccagatggatcatacacacattatattgtggaggatagcggaacaacggaagttacaggaatctccaaggatggcttcacgaaagctgtggtaacaattaatagttatggaaaatacattgataaaaagggtacttatgatgagaagcttacaaatgaggtatataatttattaaaaacagaagagactagaaatacagatatttcatcatcattttattctatgccaaaagatcagttggtatttttgctttcaacagcagatagatggtacaatggagagatatcagatcgaaaaagagtgaatttgtttcgttatacgccttttaaagatgcaatgtgcttttattcgatgtatggcgatagagaatatatgggtgggaataatagtaaaataatagaaatagataatgcgaaaaatgctagtgatgtggtaaagggaataaatacatatatggaatcggagaattgggcaagaccattactatatattaaagtgcatactgatttaaataaaaagtatgtctatatggtaacatggtaacatttttacgagaatatatgggtaaggaaaaaggtttcacttttaatataagggtgaaaccttttttacattgtaaaggtttcaagttctgtttcaagatccttaattcgctttaacagataaaaccttaccttttcatctggcgtgtgatcggcttcatattttaacttatttatagtattctgtttgttcgcccattcttttagaaagttttgtaaatcaggagaattaaaagaatagattacaaagtgccgtctgtaacacaaaaaattgtgtacagatggcactttgtgttatactctgaatacgaaagatatatctatatttttggaacgacaaatcacacaaagcgtggtttcgttttgtttcaatgtccgaaaataaaagaacagactacagaaagagagaaataaaggaatgcagtaccacggaggagatatataccgcaatcagataagactggatttttcggtgaacaccaatccgcttggaatgccggactcggtaagggaagcacttcatcaggcggtggaggaggcggaacattacccggatatccatgcacaggaacttgcaaatgcagttgcagaacagctgcggatatcagagaaaaagcttgtgtttggaaatggtgcgtcagaattgttccatgccgttttacacgcagtaaaaccatcgaaaatactgatcccggtgccgtcctttttaggatatgaagaggcggcaaaggcgctggactgtgaagttattttttatgagatgaaaaaagaggaaaaattctgcctgaccgaacggattcttgatgcgttagacgagagcatttctctggtatttctggcaaatccaaataatccggtcggaaatctggttgagccggaactgatatttaaaattgcagaaaaatgcagacaatgtgacattacactggtgctggatgagtgttttatggaactgaccggaaaagaacagaaatattcctttttaagttatttagaagaatttccgaatgtggtcgtggtgcgtgcatttaccaaattatatgcgattccgggggtgcggcttgggtatctggtctgtgaacagactctggcggaaaagatcagattgcagctgccggagtggaatctttcggtattcgcccagagggcaggagtcgctgcaatcaaagagcagggatatgttgcacgcactgtgacctgtatacagacgcaaaggctgtttttgcgtgaagaattaaaggcggcaggatgcattgtgtatgattccgatgcagattatctgttgttttacagtgaaaaaaagctggatgaactttttttacagcgcggcattttgatccgtgactgtagtaatttccggggactccagagaggttattaccggattgcggtaaaatcggaagaacagaaccggatatttgctgaggtgctaagggaaatccatggaaatgcgcaggcagtagaatgcattgaccggatgaaagagaagtcagaagaacgaattgacagagtaaaagaggattcgaaagagcaaagtgatagagcaaaaaggcaggagtgcgccgataaagttggaacaacagcccaactggtacacaaaacaggcgcagtagaatttgtactgccgggagagatcgaggggcgcagttttgcaattatcacaaaagaactggaagaacgtggtattgtgatcccgaaagagcaggagccggtgacaaaaagagtgatccacacgagtgcggatttcggatatgcagatacacttactttttcggagaatgcagtggagattgcaaaacacctgatccgcacaggagcggatatcgtgacagacacaaatatggcgctctccggtgtcaacaaaaaagtgcttgaggcacatggtggaatggcgcgttgttttatggcggacgaggaggttgcaggagaggcaaaagaacgcaaggtgacaagggcggtcatttccatggaacatgcagcaaaactggacaagccggtcatatttgccatcggcaacgcaccaacggcactgatccgtttgtatgagctgatttgtgatggaatttaccgtcctgcatttatcatcggagttccggtcggattcgtcaatgtggaggtggcaaaggaaatgatcctgcacacagatgtgccatgtatcgtgaaccggggaagaaaaggaggcagcaatgtggctgctgcgatctgtaatgcacttttgtatgaagtgcggcgggaggatgcagcgaaaaaggtggattgatatttacaaatggaaatggagatacctatgcgttacggatttacgaccggaagctgtgcggcagcggcggcaaaagcggcggcatatatgctgatcaccggaaaaataaaaaatgagatagagatcgagacgccaaaagggattcggtatcatgctgaaatcacggatatccggcgaagtgaaactgcagtgagctgtgccgtgatcaaagatggcggagatgatcctgacattacgacgggcgcacatatcgtggcagaggtttcaaggattgacggcggcatacagcaaaaagaaccgtccgtgcatcggcaaaagagtacgatggatggcagcatgcagcaaaaagggcagtccgcgcatttacagagaatcgtaatcgacgggggatatggtgtcggacgtgttacaaaaccgggattagaccagccggtcggaaatgcagccatcaatcatgtgccgcgtgagatgatcgaaaaagaggtgcgggaagtctgtgcgctcacggatgaaacggcagatcttctggtggaaatttccgtgccggagggggagacgcttgcggcacagacgtttaatccgagacttggcatcacaggcggaatctccatccttgggacgagcggtattgtggagccgatgagcagcagggcactgcttgaaacaatccgggtagagttaaatcagaagcgtgccatggggtattccattgtggcagtctcaccgggaaattacggactggattatatgaaacggacttatggttatgatctcgataagagtgtaaaatgcagtaattttatcggagatacgatcgatatggcggtggaaaatggatttgaagccatgcttctgaccggtcatatcggcaagctgataaaagtcgccggcggcatcatgaacacacactcgcaggaaggagactgccggatggaactgatcacgtcatctgctctgtcagcgggtgccgatgcagatacggcacgtcagatcctttcctgcgtgacaacggaagaggcggttaatgtgttgaaaaaagccggattgtgcgaaaagacgatggaactgatcatgcaaaagataatgttttacctgaataaaagagccgcagggaaaattgcggtcgcgtgtattttgtattccaacgagcacggaggacttggagagagtgcaggggcggcagagctgcttgcgagactgaaggaggagaaaagatgatttattttgcaggtgccggctgtggggcggcggatctgatcacggtgcgtggaatgaaactgttagaaaaggcggatgtggtgatctatgcaggatcactggtaaatccggagctgctttcctataccaaagaggcatgtgagatatataatagtgccacgatgacgttagaggaagtgatcgaagtgatgagaaaggcagagtcggagagcaagatggtagtgcgcctgcataccggggagccaagtctttacggcgcagtcagggagcagatggactgtctcgatgaacttggaatttcttatgagagctgtccgggagtttccgcctgctttggtgcagctgcatctctgcagatcgaatatacactgccggaggtctcacagagccttattattacccgtatggcaggaaaaacatcggtgccggaaaaagagagtatcgagagttttgcagcacatcaggcatccatggcgatctacttaagtaccggtatgttagaggaactttccagacgtcttgtggcaggtgggtatacgaaagacaccccggcagcgttagtgtataaggcgagctggccggaagaagaagcatacctgtgtacagtggaaacattgccgttagttgcaaagaaacataatattacgaaaacagcactggttctggtgggaaatgttcttgcaaataaacgctgcgcgcgctcaaaactgtatgcgccggattttgaaacggaattccgtaaaaagaaggagtaacacatgcagatcgatatcatgagttttaccaggcgcgggatagaactctcggcaaagatacgggaatgtctgtattcgtgtgggaaagggtacgaagtgtgtctgtatacaaagtatggcagatatcaggaaatatcagatgcagagatacagactgagtggatccgggaacacaatcgtgccaatggcaaaaatccggtttatgtcaaagaaagcatctacgactggatgcgcgcgcgtttcgaacaaaacagaaatgggaaaaagacagcagtcatctggatcggcgcatgcggaatcgcggtgcgcgccatggcaccttctctgcgtgataaactgacagacatcccggttctggtggtggacgaggcgggacagtttgttatcccggttttgtccggacattatggcggagcaaatgaacttgcaggactgcttgcaaaacggatcggtgcagtgcctgtcataacaacggcaaccgatgtcaatcatgcgtttgccgtggatgtttttgcgaaagaaaatggacttttcatacagaataaagaggaaattgcaggaatttcgtcgaaaattctcgatggaaagaagattatgataatgacaggcgggcgggtggaaggagagataccaaaatcggtactgatatctgacataacaacatgtgaagaaaatccgccacaaaagtggtcggtgaaaaaagaacaggaccatatatctatgccggatgttgtgatttctgcaaggtatccggtaaaaaatattccaaagagtcaggtcatagatgaacaggtggatgttaaaacgcatacagatccgctctggctgatcccccgcaccatcatccttggcatgggctgtaaaaagggaaaatcctgtgaggagatcgggcagtttgtcttagagacattagaacaggaacagatatccatacaggcagttacagcgcttgccacgatcgatctgaaaaaagaagaaccgggatttttagaatttgtaaaaaaatatgggctggactttctgacgtatccgaaagaagtcttaaaagaagtgccgggaaccttcagcggttcggcatttgtgtcacagacagtcggcgtggacaatgtgtgtgaacgcgcagcgcttgcagcatgcaggaaagaagataaagagaaaataaagcagcctggatgtggcagtgagggaaaagaaaaatcgtatatgcagcaaaattgtgacagcagggaaaatcagaaaaaaatgttagtacagggcaggttactgctcaaaaagaaggcaaaagacggaatgacgcttgcgatagctgagcgggaatggagtgtaagatttgatgaaacataaaatatatattgtgggaatgggaccgggagaagaagcaatgatgacgatgcaggcgtatgatacactgctggcatgcgatacgatcatcggctatcaggtttatttaaaactgttaggcgaagcatttgcggaaaaagagcagctttctacaccgatgaagcaggagcgggagcgctgcatcctctgttttgagaaggcgagggaagggaaaaaagtttccctgatctgcagtggggatgcgggggtctatggaatggcatctttgatgtatgagatcggggaaagttacccggactgtgaacttagtgtcgtgccgggcgtcaccgctgcacttagcggagcagcgtgccttggagcaccattaaaccatgatttctgcgtaatcagcttaagtgacttactgacgccgtgggaaaaaatagaaaaacgtttaagagcggcggcggatggggattttgcgattgcgatctacaacccgtccagcagaaaacgtgcggactatctgatgcgtgcctgtgatattctgttagagacagttgaggagacacgcccgtgcggatatgtggaaaatatcggaagagatgagtcaaaaatggaactttgcacgttaaaagaattgcgggaccgtcaggtcaacatgtttacgaccgtgtttatcggtaattcagagacaaagatcatagacggacatctcgtcactaaaagaggatatcatatatgaaacggatattgattttttccggcaccacagagggcagacagttagcggatatcttagatgcatccgggatctgcgcggatgtctgtgtcgccacggaatatgggcatgaggtcatgaccgaggggcagtaccggaatatttacaccggaagacttacggaagaagaaatgaaagaattcatgcaaaagggagactatgctgcaatcgttgatgcaacgcatccctatgcggtcgtggtttcttctaatatcaggcaggcgtccgcacaggcaggacttacgtattatcgtctgcggcggacactgcagtcggccggagatgacagcgatgtaatttatgtaaagtcacagcaggaatgtgtccgtgcgttagagcagaccagtggcaatattcttcttacaacgggaagtaaggaactgcactgttactgcgaaaatgaggcattgagggagcggctgtttgtccgtgtcctgccagggacagagagcatagagatctgtcataaaaacggcattttagggagacagatcattgccatgcagggcccgttttccgaggaaatgaaccttgcacttctccatcagtatcagatccgttatatggtcacaaaagagagcggtgcgtccggtggattttcagagaagatcagtgccgcgaaaaaggcaggggtatcggtatttgtgatcgaaaacccggaggcggagaacggggagcaaaaggaaaacctagaggaaattcttcaggaaatagaacgtttgaccggtaaacacattcgaagaaaacagatgcaggtatctcttgtcgggatcggcatgggaaatacaaaactgatcacagaggaagcggcggagcgtataaaaggcgcagatctgttattcggggcaaaaagactgctggatgcggtgccggcgcaatggaatgtagctgcggaacgactgccgtattatctggcaaaagacattcttccatgccttgatgatgcaggtgaaaaaagtgggaaagccattttccatgcagtcattttattttccggcgataccggattctacagcggtgcagaaaaaatggtgcaggcattgcagggcagggagaacacggaggtgtccgtctgtcctgggatttcctcggtttcttatctggctgcgcgcagtggtaacagctggcaggatgctaaaatcgtcagcctgcatgggacagaccagatggagcgtttgataaaaacggcagggatgagagaaaaagtgtttgttattacatccggtgtttcggacgtccgcgaaatcgggaagcggctgatcgaatgtggattaaaagagacgactgtgacggtcggatatgcgctgtcctatccggcggaacagataaaaacattgtccccggaagaatgtatgcagcttaccgacgagggactttatacctgtctgatccagaatcaggggatttcgggagaaaaaaagaattctgatccaaaattcctgacgcatggtctgccggatgacgcattttgccgggataaggtgccgatgacaaaggaggaagtccgggaggcggcaatctgtaaaatgcacctgacacccgacgcggtggtttatgatatcggaagcgggacaggctcaatcgcggtcgagatggcaaggctgacagacaatcttaccgtctatgccattgagcgaaaacaggaggctgtcgcactgatcgaaaagaactgcacaaagtatggacttgccaatgtaaaagtgatctgtggggaggcacccggggcacttacagggcttccggttccaactcatgcatttatcggtggaagcaatggcagtttaaaggagatattaacggatttataccggaaaaatccgcgtatgcgtgtggtagtgacggcaattacgttagagacggttggggctgtttcttctatgttaaatgagtttccggtggaacaggaagaaatcatccagatgtcagtcagccgtgcgaaaaaggcgggacgttatcatctgatgcaggcggaaaatccggtgtttatcctgtcgttttattttgcaggagggacggagtcatgaggacaccaagaatactgattggcgcgacaggaagtggaagcggaaagactacgatcacctgtgcactgcttgaaatattaaaaagacaggggaaaaaagtacaggcatttaagtgtggaccggattatatcgatccgatgtttcaccgcacggtacttggaataccatcgaaaaatctggatacgttttttaccggggagaaaatgacggcagaactgtttatggagtctgcagtaaatgcagatatctctgtgatggaaggcgtaatgggactgtatgacgggttaggcgggatccggaaagaaggatctgcctatgatcttgcgacggtgacagacacgccggtcattttagtcatcgatgcgcacggaatggggaggagcattcttccgctgatcgccggttttctttcctatgatacgattcatctgatccgtggaattattttaaaccgcacctccggcgcattttttgagacgatacggccggagatcgagaagagttttccagtagaagttcttggatattttccaaaccagaaggagattcttttagagagcagacatttgggacttaaacgcccggaagaagtagaaaagatggcagaactgctggataaaacggcggatatgttagaaaagagcgttgatatagacaggctttttgcaatcgcggagggggcatcagaactgccggaaggcagcacattagaaaaagacagttacggtaagcagaaagtacatttgcaaaaaagcggaaaaagacccgtgattgccgtggcacgcgatgaagcgttctgtttttattatgaggacaacttaaaggcacttgaaaaagccggcgcagagattgtatttttttcaccgcttcatgatggaagtgtgccaaaagaagcggacggtctattgcttccgggagggtaccctgaactctatgcgaaagaattatctgaaaataagacgatgcttgcggatatcagggaaaaggcggaactcgcgatgccgatcgttgctgagtgtggcggatttatgtatctgcatcagacgatggaagatacagagcatcatgtttatgagatggcaggcgttgtgccgggagactgcttttacacagggaaactggttcgtttcgggtacatcgaacttacggaaaaagaatcaaactttctgccggaaaatggcagcataaaagggcatgaatttcattatttcgacagtaccgcaaacggtgatgactgtgtggcattaaaaccggtaagtgggaaaaaatatgactgtgtttttgataaaaattcatgctttgtgggatttccgcatctttattatccatctgcgccgcaatttgcggaaaattttgtaaaaaaagcaaaaaattatgcggacaggtcagaagtaaatagctaaggaagcattttaatgcagcaggataaataaattgttgtgaaatacaaaaaatatgaagtgaaaacacaggaacagaatttaagtaaaaaaaggggaatacaaccgtgaaaaatacagaaaaaacagggatcctctacggaatcggcgtcggacctggtgacccggagctggtcacattaaaagcggtacggatcgttggagagtgcgataccgtgatactcccggcaaaaagcaaagaggactgcatcgcctacggaatcatgaaagaggcatgtgggaaaattgcagaaaaagaattgatatgtatgccctttccgatgacaaaggatgagagcagacttactgcggcgcatgagcagatctgtcttgagataaaaaaattgttagataacggcagacaggtggcttttttgacgatcggagatccgacggtttactccacttaccagtatatccataaacgtatggtaaaaggcggctatgaggcacatatcgtaaacggagtcccgtctttttgtgcggcggcggggacacttggaatatcgttagcggacaataaagaagagatccatgtgataccggcatcctatgagataggaaaaacagcagaattttccggaaccagaatttatatgaagtccgggaagaaattaggagaattaaagcagatgctgcaaaaacagcaaaaagatagcagactggaagtgtattcggtagaaaactgtggtatgatgaatgaaaaaataaccacagaggtggaaaagttagatgatacctccggttatcttaccattgtgatcgtaaaggagcattgaccttggaaaattcctatcgttattttgaaaacagggcatgtaaatattatccgtgtcatgaggtggaaaatgatgagatgaactgcctgttctgtttttgtccgctgtatgagagagaacactgtccgggcaatccggaatatattaacagtaagggcagagtcatcaaatcctgcatgcactgcacatttccccacgaagcggaaaattatgatattatcatgcagtttttaaaaaagaaagcagagacggaaaaataagtgacagaagagaaatttattcatactaatttaaaaaacgaactgacacacgatttccttgtggaaattttaaagcattaccattatgagcaaaaagatatggaaatgctaaaggaagttgcaggggaactgcgcgaatgccttgccggggaggaaggattttactgcatgacgaggcgtcagtgtgaacagatcctgaatctgtgcagagaagaaaattatgcaatcgggatatttacgctggggagcagggtagatgagctcgagaaccgttatagcagcacagagcgtttaagagaagcatatgcagttgagacgatctgctgggagcttttgcggaaaggatatgacatgtttcagaggtgggcagaggcacatttgaaacagcgccttgaatcttatcatttttttggctcggaggaggggcttccttttgaaaaaatggcacagcttttagcagagatgggacagaatcggattacctgcaatcaggcatactgcatggaacccaaaaaaagcgtgatgtttttagcggaactttccggtggaagtctgaaagtggaatctaagcggaatttccgggaaaaatccggggaaagttccggtgcaggagtaaaatggaatgctgctgaaacagaaaaatgtggtgacaaaagtaccggaatctgtgcatcctgcagcaataaagaatgtgcttatcgaagataaaaagattgttttttataaaaaacatccgaaaaacgtagtaataaatttggcaattatttcaaaaaacatccgaaaaaacgggtgtttttttgtttacctggtcagttctaccttattcgaacataatttcggatggatgaatggctgataaaaaacaggacacatatcaaaaaattgagtaaaaataagcaaattttttttcgggaaaacatgtataaaaaatttgacttttggatataacctaagtatgatatgtgcctgtatcaaatgacggcattcgtcatgttgacatatatgtatcattcttgaggaaaggagcaaaatgagaaagagaatattgggcgcggcagtgctgtttagttttatcgtcagtctgactgcagcatccaacatgaaagaagacgtaaagatcaaagaagttccggcaatggagggacttgcagcaggatcaatacgttttgcacattcatttacgccagaatcagatgaaaaaacaggaatcgaaaaaaaagaaagtatgatagtaacatctgcatatgatgatgatctgatgcaggaaaaaataagaaccacaaaagaaacacagatggaggaggctgcacaggcggtgcaggaaactccggcagagcagactgcacaaatcgtgcaggaaacgcaggctgcaccggctgcaccggaaaaccgctggcatatcactttatcgccggatgaaacagagctgcttgcaaggatcgtctggttagaatcacagggagaaccggtgaaaggacagcaggcggttgtggaggttgtgtttaaccgtatgagaagtgatgtgtatccggatacactttatgaggttttaagccagaaaaatccggtacagttctgttcttttaaaaacagggacagggcaaaaccgacacagaaggaatatgactccatccagcaggtgctggacggaaaaaccagaatattaagagatgatacaatgtatttttccacatttccgctgacggaacatgtggaggtcaaaattggtgggcattatttttgctattagcacaacggaaaaagaacggaacggtcatgaaaatttttcagaccgggaagttctttttttgatattagaaattgacttccctctgcggagaaattatactgattcttggcaccggaatgtctggggaacgcgcattcgattgtttattgttcctgatgacagtgtgtttgaacgtgtacaatttattatagagtgaattttcagcaaaaaaacaagaatggagtttccatgggagatacaagaaaagaagaagcggagtttagtcttcgcaaaaaatatcataagacaatattttcacgttttgcaagagcaatcaacacctaccggttagtggaagacggcgatcatgttgcagtctgtattgcacagggcgggaatggactgatccttgcaaaatgttttcaggagataaaacgccacagaaagattgatttcgaggtggattttttttcattcgaagaggagaataacggaaaatttatccggattgcagaagagactggtattccggtgcaaaaactccactctgtggatgacgtaaaaaactccggctgtaataagttagcggtggcagactgctatgaggatgtgatagaaatgatacttacgggcgtactgtataggggagaaatcagtactctgatgccaaaagaaaaggagcgtgactttggcggcatagaggttatccgcccgttttatctggtgcataagcaggatctgaaagaatggaatatggagtttggaatggtaacaggaacgaaagaggacttttcagaccagcaggaagaagtaaaacgtctgctggaggaatttgaaaacataaatcccggaattgcggcaaatatctttaaaagtgtggaaaatgtaaatttaaatactgtgattgcatatcatacaggtatgggacttcacagttttctggaagattacgaatagtaacaaaaataggactttagatacagtttattttggttttctatttaaaacaggaaataaaactgttataataaaaaacaggtttcataaaatcagagtagcacagaatggggattactatggaaaaacagcgggcaattttggagagcgttataaaagaagaaattgattttatttcatatgtagatctggcagacgggatggtgcataccatcgttaccaatgaggatgcggatgttatgccgccaatagatggagattatcagaaagtcaatgatatggcaattccagagtatgtacatccggaagacagagagaggtgcggaagagagtttaggctggagcatctgcaggaaaatttacagaaaaaagaacatctggtcatcaattaccgtttgttgtgcggcggggaataccgtcggaaatcaatgaatatccactattatgacaagacaaaaatgacccttgtttttgtgcgcagagatgttacggataattatgaagaagaacagaatcgccagagagagatttatgatgcaatgctggcggcaaagcgtgcggatcgttccaagagtgaatttttagagcgcatgagccatgaaatccgtacgccccttaattcaattatcggactttcctatctgagcagggcaaatcttggcgatgaaaaaaaggttctggaaaattttgacaagattgagatgtcggcacagtttctgcgttcctgtatggatgatattttaaacctttcgctcttagagagcggccgtgttgcattccatgaggaaagtacggattttgaagcattcctcacacatatcgagaaagagttttcagataaggcgcaggagaagaagatttctttttctgtacagagacgtggttcatttgcggatcaatatctgtttgaccgtgaaaaattaaatgaggcgctgtcagcgattttagaaaacgctgtaaaatatacacagccggagggaagcgtattttttattatagagctttttaccagaggagaacaggaaacgatcttccgtttcgagatccgggataatggaatcggtatggaacagaattttctgccgcacatttttgatgcatttgcacaggaagatgacagaaatacgacgttaagcggtggaaccggattaggacttaccatttccaaaaatattattgattttatgggcggtaagattgatgtgtacagtgagaaaggaaaaggctccgcgtttgtcgtgacggttccattaaagactgcaaaagaggacagacggaggacagagcggacgacttatcaggaatatgatttttccgggaaaagggtattgcttgtcgaagataatgaaatcaatattgaaattacaagaaacattctgatacataagaattttatggtggatatcgctgagaacggaaaagcgggcgtggaacagtttttgaagcatgaaccgggatattatgatgtgatcctgatggatatccggatgccagtcctggatggacttgctgccacacgctgtatccgtgaatcggatcattcggacagtaaaacggtaccgattgttgcgatgaccgcgaatgtatttgaggaggatgtaaaaaaatcatttgatgcaggaatgaatgcccacttaagtaagccggtagatattaaacagatgtatgctgttttagatgagctgataactggtgatggattactttaaatgagatgcataatctgacaggttctgaccacactattgtttaggcgagtcaatgtcaagacgatatgccgacgatagatttaaaatatggaggtggaacatgagccagttatcagaaaaagagttatccgtgttaaatgatctgctgaccgaggaggatcttctgatcaaaaaattccagatgcttgcagaacacacagaggatcaggaaatcagtgcaaaatttacggagatttcccagaaacatcagggacattttaactccctgtatgcacagttaagctaaggaataagagagggaggaagatcatgactgagcagatttatacagacaaagagatcttagccgatgcactcacggctgagaaggcggcaacaaataactataatgcatttgcaaatgaatgtgtgcacgacagtgtgagggatgcgatccttcactgtttagagcaggaacactgcatccaggaagatgtgtttaacatgatgcatcagagagggctttatccgacaccggatgccgatgcaaacaaagtagaaaatgcaaaacagaagttttcacagtgtgtgaagacagtgtaaaacaaaacaatagatcaacgcttcgcgggcagatctatgattagaaatgaaaaggcgcagatccggtaaggatctgcgtcttttctactttatggaaaccgttttttcttgacaagcacttatatattaggttagactaacggggcaaagttagttcagcctaatagaaagaaacaacggatgggatactttgcggacagaaatgttgtcaggaataaaagcagagagggaagatttgaaaagataagcggatatgaaaacagaaacaaaaaagatacaggacaaacgcaaaaaggaggtagagacggtttcataatactgtcgttctggataacctgtatgggctggatgaaattttgcagtatggacagcaggaaaaacgtctgagagaaatgaacagccagacagaacagttagagcagaaaaaccagaagttaaagatggcagaaaatacacagcgcatcgtgactgacggagtgatcctgatcgcgggtgtccttatggcagcagtctgcgggcattttgcagagcaggggacggtgagcgcggatcaggcaatggtcgcggtgatcgcaatgatcagctcctttggtccgacggcggcactttccgtactttcgaataacttacagcacacacttgcgagtggaaaccgtgtgttggacattttagaggaagagccactggtggaagatgttttgggcggaagtacagtgtgtgaaggtgatatatcctgtgagcatgtatcttttgcatatgagtctgcgctgacaaaagaggggcaaaaaggagcacaggctgagtttacaaaagaggataaagtggaaatacaggctgagtataaaaaaagtccaaacggagtattagagaactttgatcatgtatttgccgagcataagatccacggaatcttaggaaagagcggatgcggcaaatcaacccttttaaaacttctgatgcgtttttatgagacatcggagggagacatccgttatggaaaaacgaatgtcggtgagatttcgactgcggcactgcgcagcagcatttcctacgtcacacaggagacattcctgtttgaggatacgatcgaaaataacatcaaagttgcaaaagaggatgcaagcagggaagaagttgttgcagcggcaaaaaaagcggcactgcatgaatttatcctgtcactgccggatggctatgacacgaagttagcggagttaggagactctgtctccggcggggagcgtcagcgcatcggtattgcgcgtgcatttttacatgacggggacatgatatttttggatgaaccgaccagaaatatcgacagtttaaatgagggaatcattttaagaagtcttgacagggaaaaagaaaataaaacaattcttctggtatcgcatcggaaatctacgatggcgatcgcagatgacgtagtggcaatgtaagagggggagtatcatttcacagatcacagtggaatgatactcttttgttactgttcacaggcaggcattttctgaactgaaaatgccgtatgatacagtggtggcagcagattttgccgatttgtaatgcgaagcatcggcaaaatccgttactggagcgaggtacgagtgaacagtaatactcttttataatattgcatgattatgcataaaatgtttgaaaaattgcagaagaaacgctacactataaaacgtatggaaatacagaaatatggaaagttctgattgattgttgacagacaaaaaatcagtaatgtttggaggaaacatatgaaaagaaaacagatcggaatgcttatttttcttgcagtgatcgtgatattactgtttgtaacggcaaatacatccggggtgatcacagatccggaaaattaccagtgcggtgtatatgcgacggtatttgcgctgctgccgccggtcattgcgatcggtctggcactcatcacgaaagaggtatatacgtcccttttagccgggatcatcaccggaggactgttatattccaattttaatttagaactgatgatcaacacgatcttctttcaggaagacgggggtatggtgtataaacttgcggacgcctggaatgtgggtatccttgtatttttagtcatgcttggaattcttgtctcgatgcttaacaaagcgggcggttctgctgcgtttggaaaatgggcatcaaagcatattaagacaaggatcggtgcgcagatttccgtcatgatccttggagtgctgatctttgtagatgattattttaactgccttacggtgggaagtgtgatgcgtccggtcacagaccggcacaaagtatcccgtgcaaaattatcctatatcattgatgcgactgcagctccggtgtgcatcattgcgccgatcagttcgtgggcggcggcagtgacatcctcggtgccggaagattccggaatcaacggttttgctgtatttttacagacgatcccgtataacctgtatgcgatactgacactggtcatggttttacttgtgacggtactcagggttgactttggaccgatgaaaaaacatgagatgaatgcaatcgcaggagatctgtttaccacgccgggaagaccttatgagggaaatgaagaagaggtcatcaatgagaaagcacatgtgctggatctgattcttccggttgcggttctcatcgcaagctgtattgtggcaatggtttataccggtggattttttgagggtgcttcctttgtcgatgcgtttgcagcttcggatgcatcggtgggactggtgcttggcggtgcggtcacgctggtatttacatttatctattatatgatgcgtgatgtgctgtcctttgaagagtttgcgaaatgcatcccggagggattccagtccatgatcgcgccgattctgatccttacgatggcgtggacattatcaggtatgacaaacctgctcggtgcaaaatatttcgtggcagatcttgtggcaaactccgcatctgcgatgcagggatttctgccaatgatcattttcctggttgctgcgtttctggcatttgcaaccggaacatcctggggaacattcagcattctgatcccgatcgtgatcggggtattcccggaaggacagatgatggttatctccatcgcatcctgtctggcgggtgcagtctgcggagaccactgttcaccgatctccgacacgacgatcatggcatctgccggcggtcactgtgaacacgtcaaccatgtggtgacacagcttccgtatgtgcttgttgtgggaagtgtatgtatggttggatatcttctgatcggtatttttaaggcagtgggacttgacgccattgtatggctgacacttccaatctgcatcgtgcttctttgtgtggttctctttgtgatccggacaaaaaacggcggcaaagaggaaatttgagttttgcgggtacgaaggatgatccgtaattgcaaaaataaataagaggactaaaatagtggtatcaggtctataacgcctgaagaaaggaaaaacaaaatggtaaaacatattattttatggaaactgaaagaggaattttcagaggaggagaaaaaacagatcaaagcagggatcaaggaaggattagaaggtcttgccggtcagatcccgggaatgacagaaatcaaagtgcgcatcgactgtctgccgagttcaaccgtggatgtcatgctagattccacatttgagagtgcggaagcattaaaaacttacagtacacatccgaaacatgtggcagtcgcagacagtaaagtcagaccgtatacggcggtgagatcctgcatggactatgagatttgaaaacagcaaaagggttctttatagattacaatatctgagcctgcaggttacacagaaaagaggatttatatgtcattagaaaaggcgaaagcatatttggagaataaaggatttttggatcatgtgatcgagctggctgattccacggcaaccgttgcgatggcagcggaagcacttggggtggagccgggcatgatcgcaaagacgatgtcctttttacagggagagcaggcggtgctgattctgacggaaggcacggcgaaagtcgataaccgcaaatacaaggatacatttcatgtgaaagcgaagatgattccgtctgatgcggttgagaaagtgatcggtcatgcgccgggcggggtgtgcccgtttggaatcaacgatggtgtggaagtgtatctcgacgaaagtctgaaaaaatttactatcgtatatccggcagcgggaaatgaccacagtgcagtgaaactcacgatcccggaacttgagcagatcgccggggcaaaaggctgggtcgatgtctgcaaggaagaaaatgtttagacagaccgtagtgtgaaaaatcagattttcacatgtaagaattgcggttaaatgaaaggaaagatactttggaatgaaagttggagtaattgcagatattcacagcaaccagaccgcattccgggcatgtgtggactatatggtaaatgccggatgtgaggaatttctgcttctgggagattttatttcggataccgccggtgcaaggcagacgatggaacttctttatgaattaatggaacagttcccatgtcatgtgctgcgcggaaaccgggaagaatatatgatagaacagcgtaagatccgggagaaggaggaagaagaaaaattctggccagccaattccgccagcggcaatcttttgtatacttacaggcagctcacggaaagagatctggatttttttgagagccttccgatcacgtttcgttatgaaaaggaaggatatccggcgtttacctgctgtcacggttctccggtcaatacaagagaactgctccagcttgacagtgaccgcacaaaagaggtattagaagagatcgatactgactatctgcttgcagcccatacacattttccgggtatcagcagatatcagggaaaaacctatatgaataccggttcctgtggaattgcgatcggagatccgggatacgcgcatgccatcatcttagagtccggtcaaaatgaatggaaaccggaatttttgcggatcccttacgatagcaatcaggtgatactggatatttttacatcgggactttatgatatggcgccatggtttttaaataacaatctgcacattttactgactggaacagatctgacaccggaacttgttaatctggcagcgaaactgcaggaagaaaatgatatgggagcaaagcgctggccgcatatcgaagaaaagtattttgcacaggcagcggattcattgaaaattccggattatacatttttgcgctatatccgccccgctgtaaaagaagataccgggaaaatcttagaattgtaccattccatgatcggcggagcggcaggctggaatgagtactatcctggaattgacacaatagaatccgatctttccagaaatgcgctttttgtgatggaaaatgaagacggggaactgctggcgtcgatctccatagatgcagacgaggcagtggacagcttaaaatgctggaatcagacgttgcttccgggtgccgaactggcaaggctctgtatccggaaagagtatcagaataaaaaactggcaaggatgatgatggcgtatgccatgaatgtcctgaggaaacagggaaagagatccgttcatattctggtgcgcgaagggcatgaggtggcaatgcgtgcttatatgcatctgggatatgagaaagtgggggaatgtagtctttatgatatgcggtttgtgtgcatggaaagggcgctgtagtgaaaaatgaaatagagaataattgctggtcagggcaggcttatttgcctgcccctaattctctgtcttttgccataaagaacaaggcgatggtatccggtcccacatggcttccggtacagaaatcgtaagaagtattaataaattcccgcacagagattttttcctgaattttatccatgacatagagcgagtcttcgtaggcatcggcatgtgcaattccgatgatctgtttttccggttccacgatattgtcacagacgagagagacgagctcgttcaacgcagcttttcttccgcggcatttcttgtactggacaataaaaccgtctttgtttccgcgcaggatcggtttgatactcaaaaggttgccgacgagagcagttgcgccgctcaaacgtccggttctggaaagatattttaaatcaccaacggtaaatacaccgttcatcttagcaggatatgtttcgagaatgtctgcaacttcgtcaacctccattcccttatcacgcatttcacttgcatagatcgctaaaattccctgagctaaagaggcattgagcgaatcgatcagacggatttttcttccgttcaccggatcatgcatcagatcttctgcggcgagtcttgcggagttgaaatttccgctgatatttttgctgagtgaaaaatacagcacatcttcgttattttccatggcactgcggaatgcatcttcaaatatggcagtgctgatcagaccggtctttacatctgcaccctggcgcacggcatcgtaatattcatgacctttctgacgttcctcttccggggataattccggataaaaacaggtgacttcttttccatttacaaagttgataaaagaaagaactttgatcttatatttttttacaagttctgcgggaatatttgccgcagagtcaacgataatctgaaacatgatgttctccaatcctgttaaatagttatagtatacagtgtaagcggttttgaaaactatgtcaagtggttttgggacattttcctctttattttataaaagagaataatagtatcattgacgctgaccatgtggtatactgcatttaagtaaatcggtgtttgggaggaaaattcttttatgaaagtgaagtgtgtttgggaacataatggcgatgacagtattctgtatgcgtccaatttcattggtgcatttacaagaggtaaatctaagtgtgaagctattgggaagatgtcgtctgaaatttcagcttacctgaagtggaaaggagctttaacctgggatgttccggaacctgagatcattcaagaaaaagtgtcaacacttaccatttctgatgcagactcagatgtgctttttgacgaggagaaaaagccattaagcatggcggaatatgaagaattaaaatcacttgccctgaaatctgcacgggatttcctgacgatgtacgaagcggtaccggataaagataaaagtgttttaccggtcagacaaaccttttacggtgagattccacgctcagcatatgaaatgtatgagcatacgaagaatgtgaatgcttactattttggagaaattggtgttcaggcagataataacggaactatcgaagaatgcaggaaacgaggatttgaactgttagagcatcagccggaatttttggagaataaagtttatcttggaagctatgatgaagaatggtcattgcgggaggtggcaatatgtggttctggtggtttattttgatatgcgattgtattattccagcgattatgataattgcgggcagaatgatgtggaaacattgtccaaagaagatcaatggagttgtgggataccgaactaagatgtcaatgataaatatggatacttggagatttgcacatgaccatgcaggaaaactttggtggaaagtcggtattggtctgttgggacctacaatgcttatacatattcctttttatggagcaagtgacgatacaatgggaatcttgagtattattatcattgtaatacaactggtgtttttgattgggtctatttttccaacggaaaaggcattaaaaaataatttcaatgaggatgggacaaagcgatagattccaattggcttgaatttggtcacggaagaaaatgaaggttatatacaatgtgaaaaactggcattattgaatttatcaattcgcggatataagaaagtggataggttacctgtttcagaaatgatgaatgtatctgatgctattcagggaatttttggatagtatagtagtaaattttttaacaggattttttacatgaaattgtttattatagtgagatgtgttacaattaagttagctgttcctaacc

SEQ ID NO: 5160 - DNA, 19214 bp, Unknown
  gut microbiota DNA sequence
ttattcaaccacagaacagatcttgaatctgacgattataacggaacaacatggaaagagtatttagcagcattcaatgaaatgtatccaaatattacagttgaacttacaaccgataccaactatgcagatgatgctctgatgcatttacagtctggtgactatgagacagtcatgatgatcccggcggttgataaggcagacttaagcaattactttatttcatatggtgatcttgataccatgaagacccagatcaattatgcaactacatgggagtatggcggacaggtttacggtgttccttctacagcaactacacagggtatcgtatacaataaaaaagtatttgaagaagcaggagttacagaacttccaaagactccggaagaatttatcgatgcattacagaaaatcaaagataatacagatgcaatcccactttacacaaactatgcagcaggctggacaatgggagcatgggatgcttacatcggaaataatgcaacaggcgacaatacatatatgaaccagaaattagttcatacaaaagatccattccagaattatggcgatgatacacatgcttatgcagtttacaagatcctctatgatgcagttgcagacggactgatcgaagatgactttgcaacaactgactgggagggctgtaaaggtatgatcaacaatggtgagatcggttgtatggtacttggctcatgggcttatcctcagatggaagcagcaggcgaaaatggcgcagatatcggttatatgccattcccgatcactgtaaatggtgagcagtatgcatcagcaggtgctgattactcttatggtatcaatgcaaatgcaacagatgatgaaaaagcagcagctatggtatttgtaaaatggatgacagaaaaatccggtttctcatacaacgaggatggacttccaatcgtagccggcagcacagatacaaaactttccttcgatggcgtaacattcttagaggatgaacctgcattagctggcgaggaagatttcttaaatgagatgaatgcagagtctgagttaaatattaacgcaggtggagacagtaaaatccaggcaatcattgagcatgcatccaatggcgataagacatttgatgagatcatggacgaatggaacacagcatggtctgatgcacaggaatcaaacggaattgaagtaactgagtaatatagttccacaaaagggaaggggaggttccccttcccggataaaagacaatggatggaggaattgtggatatggaagggaaaaaaccattcagttttacaaaatgggcaaaaagcagaaaaggacagcaggtgatcatctgtgtggcatttatgacaattccgctgttattgctgtttgtatttacttatctgccttttgccgagatggtaaaattcagtttttataagatgaaatatttaactccggtagatcagagaaaatttgtcggatttaaaaattatattgacgtatttcgcagggatgactgctttggagcattaaagctcagtctttattatatggtaggtgcgattattcagcttgtacttgcactttatctggctactattttaagttttaaggtaaagggaggaaacttctttaaaggattaatgtttttcccatatctgatcagtggtattgcgatcggatttatttttaaatttttctataccagaggatttgtatttgatacgatcttacaatggtgtggatttaaacttgacaatcttccatactggctgaaagatcagtcaattaacaactggtctttggtggctacttcggtatggcgttattttggacagaacatggtattgtttatcggtgcaatcatgtctgtggatgcagacctttacgaagcagcagagttagatggtgcaaataaatttcagcagtttaaacatattattctgccgagtatcaaaacaattatcactttaaatgtaattctttctatcacaggttccttaagtgcatttgagcagccttacgttatcacagatggtgcaaatggaaccggaacatattttgtaattatgaatgagatcgctcatgtaagccagaaagtcggtcttgcatcagcaatggcagtcgtacttctccttatcatttttgcatgtacgattttacagaagttattctttaaatatatcttccgtgatgctgagagtgaggatgaatcctacaaggcaaaacgtgcaagattaaaagcagaaaaacaggcaaagaaagtcggaaagggagtggcatagggcgatgaaaaaatataatgtaaatgtgcagaaaagaaaaaaacattataccgttggtgcaatcctctggctgatcgttgaatatgtatcgttgattttctttggactttgtgcagttgttccggttatctcctgtgtgattacagcatttaagacacaggaagaatatcaggcgaccaatgttatgacattgccggagaactggctgaattttgataattttattaaagcatttcagacagcggatatgggaagagctttcttaaactccgtgatcgttatggtatctgtcctggttgtttccattgtaatcggaacacagcttgcttatgtattaaaccgttttaaattcccgggaaacggactgatccgaaacctgtttttgtttgcttcactgcttccggcagttgcaatgcaggtaactgtatataatatcatgacagcactgcactttgtcaatcatttatatggatatattattctgatgtgcggaacggatgttatctcaatttacattttcattcagtttatggaaaatataccaatatctctggatgaatcggcaatcattgatggcgcatcctactggaaaatttactggaaaattatgcttccactgttaaaaccggcaatcgtgacatcctgtattttaaagggggttggtgtttataacgagtactatatggcaaacctttatctgatggataaaaagttacatacaatcgcgacatcactttatacatttgttggtccgatgggaagtcagtacaacctgatctgtgcaggtgttatcatttccctgcttccggcattgatcgtatttatcctctgtcagaaacagatttacagtggaattgctgctggtgcagtaaaaggctaaagagagaaagaggaaacggctatgggtgagttaaaagaacttgcagcagaagcaaaacacgaactgctcacacatatcattccattttggagaggtatgcgggatgataagttcggcggatattacggttatctttcctatgatcttgcactggatgaaaaagcagaaaaaggatgtatcttaaacagccgtattacctggttttttgcaaatgcgtatttactttataaagacggcggcatttcggaagaggaatgcgaggcagcaggttttaagggagaagacctgcttgccgaggcaaaacatggttataaatttttaagggaacattgtatcgacaaagaatacggagggatcttctggtcattaaattatgacggaacaccacttgatacaaccaaacatacatacaatcaggcattctgtatttatgcgttgtcatcttactatgatgcagccggggataaggaagcgttagaacttgctttttccctgtttgatatcattgaggagcgctgcaccgatgagatcggctacttagaagcttttacaagagattttaaaccggaatcaaacgaaaagctttctgagaacggtgtacttgcagataagacaatgaacacactgcttcatgtttttgaggcgtatacagaattgtatcgcgtgacaaaaaatgaaaaagtcggaaagagactgatgtggatcatggatacctttgcagataaggtatacaatccggtaaaacagcgtcaggaagtattttttgatgcagactataacacaatcttggaccttcattcctacggtcatgacattgagacagcatggctgatggatcgcggtgtcgatgtattaaacaatgaacattaccgtgagaaaatgacaccgatcacaaagacactgacctcaagaatttatcaggtggcatttgatggtcattctcttgcaaatgaatgtgaccgcggagtggtcaatgcacaccgcgtctggtgggtgcaggcagaaaccgttgttggtttcttaaatggttatgaaagaaacacaggacattctgaatattgcgatgctgcactggcagagtgggagttcatcaaaacctatgtggttgataagagaaatggttctgagtggttctgggaagtcaatgaggatggaagtccgattttagacagaccgatcgtagagccgtggaaatgtccgtatcataatggaagaatgtgtatagaagtcatccgcagaatcggagcataaaacagattcatttatttttagaaaaagaatggagattcgacgaatgttacatgagagatattatgtagaaaaagaaaagcaggaaaaactgctttcccgcaaaaatgtaaaatcggatttttacaatggtgtttatgaccgttatgaatatccggtattgacaagagagcatattcctctgacctggagatatgacttaaacccggagacaaatccatatttcatggagcgtcttggaatcaacgcagtgatgaattccggcgcgatcgaactgaacggaaaatattatctggttgcgagaatcgaaggaaacgatagaaaatctttctttggtgttgctgagagtgacaatggaatcgatggtttccgtttctgggattatccgattttattaccggatacctgcccggaagagaccaatgtctatgatatgcgtctgaccaaacatgaagatggttacatttatggtgtattttgttctgagtcaaaagacacaacggtaaatgacctttccgcagctgtagctgcagcaggaatcgtccgtaccagagatttaaagaactgggagagactgccaaatcttgttactttaaattctccgcagcagagaaacgtggtacttcatccggaatttgtagatggcaaatatgcattctacacaagaccgatggatgactttattgaaaccggatcaggcggaggaatcggatttggactttgcgaagatatcacacatgcagtgatcgatgaagaaaaaatgacaagtcttcgtaaatatcacacgatcacagaggcaaagaacggtgccggtgcaactccgatcaagacagacaaaggctggatccacattgcacatggtgtccgcaacaccgcagcaggactccgttatgttatctatgcatttgcaacagatttaaacgatccgtcaaaagtgatcgcagagccgtccggactcttaattggaccgagaggtgaagagcgtgtcggtgacgtaagcaatgttgtatttaccaacggtgcgatcgtaaatgagaataacgaagtatttatctactatgcatcttctgatacgagaatgcatgtagcgacaactaccgtggataaactggtagattatgtatttaatacaccgcaggatccgggcagaagcgttgagtgtgtggcacagagatgcggactgatcgagaagaatttagagttccttgcaaaggaagataaataagaaataaaaaagaacgacgaaaataaattgcagatagaatctgcaggtgcgtggatgtaagacgcagaaatggaggaagaaaatgagcaaatataaaatgatcagccagccggtaccaaatgtaccatggcaggaaagaccggaaaacttaacaggagcaccggtatggagatacaatgagaacccgatcatcggacgtaacccggtaaaaggtgttgcaagaattttcaacagtgccgttatgccgtatgaagatggattcatcggtgtattccgtggagagcagactaacggtattccttacatttaccttggaagaagcaaagatgcgatccactggaattttgatgaaaacaagatcaatttcgtagacgaggaaggcaaaccgtttatgccgcgttatgcatatgatccgcgtcttgtaaaagtagaagatacctattacatcatctggtgtcaggatttctacggcgcagcaatcggtatagcaaagacaacagatttcaagacattcacaagaattgagaatccgttccttccattcaacagaaatgcagtgctgttcccaagaaagatcaacggaaacttcatgttattatcccgtccgtccgacagcggacatacaccgttcggtgatattttcgtgagcgagagcccggatcttacttactggggcaaacacagacatgtgatgggcaaaggctctgagtggtgggagtccttaaagatcggtggaggtgctgccccgatcgaaacatccgaaggatggctgttattctaccacggagtaagcggaacctgtaacggttatgtatattccatcggtggagcaatcttagacattgacaatccatctatcgtaaaatatcgttgtgagacattcttactcacaccggaagaatggtatgaggagcgcggatttgttccgaacgtatgcttcccatgtgcaacaatccatgattccgaatccggaaaaattgcaatttattacggtgctgcagacagctatgttggtcttgcattcacagaacttgatgatatcattgattatatcaaggaaaacagtgtcgtaacaccggaagataccgagatcggaagacgctaaaattgctgctattcatccttaatagcataaaattaattcataacacaggctgccagatgcaatgaaaattgcggcagccttgttgcgtaattcatgaaacgtgtgatggagtgtccgcagaacgtgcattttatcataatggaatgtccgcggagcgggcagtctgcttacatatttaatttttggagggaaactcagaacatgataattaaaccagataatgaaatgttgtcttacagcggaagaattgattttgatgacaggcttgcaccggttcttgtctatgcgtgcagctcaattggaatgaaatttgccggaacatccttaaaggcagtgatcgcaaaccatcgttcctgctggacgaatgaactgggatattttatagacggggaacagaagcgttttaccttgtcgtctgatgaagagaaaaagacttatactttggcggagggactttcagagggaacacatgaactgctgttatttaagcgtatggattcctgtcatacttttacgttctatggatttgagattgatgatggagcggaagttctgccactgccggaaaaaccaaaacggaaaatggaattttttggtgacagtgtttcctgtggagaagtttcggaggctgtggcatatgttggaaagccggatcctgagcatgatggggaatattcgaacagctggtattcgtatgcgtggatgacggcgcggaaattaaatgcgcagatccacgacacttcacagggtggaatctcacttttagatgataccggctggtttgcagcaccgcactataaaggtgtcgagtcctgctatgacaagatcgagtaccacccggatcttgggccaaccaaacagtgggatttctccaaatatgttccgcatgttgtcgttgttgcgatcggacaaaacgacaatcacccggtagactatatggcagaagattatgacagtgaaaaatccaaaaactggagaaaacattatcaggcattcatcgaaaaactgatgcagctttatccgaaggcgcagatcattttagcaaccacgatcctctgccatgataaaagctgggaccgctccatcgacgaagtctgcacacgcattggcagtgagagagtccatcattttctctacacaaaaaatggctccggcacgccgggacacatccgcatcccggaagcagagcagatgtcggatgagcttgcggcgtatatcaactcattaggggatgcagtctgggaatcttagttttgcaccggaaacagcaaaaaaggagagaacatcaaatggaatatcaaattaaatacgaaaacggcattgccaaccgcggctgcttataccgcctgaaaaaagtcatggatcgcgccaaagcaggcgaagctttaaacatcgcatttttaggcggctcgatcacccagggaagcctttcttccaaaccggaactctgttacgcataccatgtctatgagtggtggaaaaagacatttccacaggctgattttacttacatcaatgcaggaatcggcggaacaacctcacagtttggtgtggcgcgcgcagaagctgatctgctttccaaagagccggattttgtcatcatcgagttttccgtcaacgatgacagcacggagcactttatggagacctatgagggactggtgcgaaaagtatataccagtaagacaaaaccggcagtccttttagtgcacaacgtattttacaataacggtgccaatgcgcagctgatgcacggacgcattgcaagacattataatcttccggctgtcagcatgcagagtacgatctacccggaagttgtcgccgggcgcatcgaaaaccgtgagatcacaccggatgacctgcatccgaatgatgccggacatgcacttgtcgcatcggtgattacatactttttagataaagtaaaaacagaagatgcaacggaacagagcgaaccggattatccgacacctctcacaaaaaatacttatgagaaatccatccgtcatcagaacagcgacgaaaacgtagtctgccatggatttgtcgcagatacgtccgcacagagagatattaccgactgtttcaaacacggatggacagcttcaaagaaaggtgattccatcacacttgatgttgagggctgcaatatttcagtacagtacagaaaatccgtaaaacttccggcaccggttgcagagatcattgtggacggcgatgcagaacatgcagtccgtctggatgcgaactttgatgagacctggggtgataaattagaacttgacaccatcttagaacatggcgaaaataaagtacataaagtggaggtgcgtctgacagagacacacgagaatgatgcagtgccattttatctggtgtctgtcattggttcctctgaaaaataattcactgggaaaggaaaagaagaatgtttcgggatgattttgtttggggtgttgcgagcagttcctatcaggtagagggaaccgatgcaaacgatggaagaggaaaaacagtctgggacgcatttacggaagcaggcaggatttttgaaaatcagaatgcgtatacaacctgcgatcatatgcatcattataaggaagattatgcgctgatgaaaaatcttggcatcaaagcataccgtttttcgttaaactgggcgcgtattctgccggagggaaccggtcgtgtcaatgaaaaggcgatccagatgtaccgtgatatgatcgcatgtatgaaagaaaacggaatcacaccgtatatcaccatgtttcactgggagtttccacaggcactttatgaaaagggtggctggctgaacccggaagtggcagactggtttggtgagtatgcgaaggtagttgcagagcgtttttccgatatttgtgaatactttatcacgatcaatgaaccgcagtgtgtggttggacttggacatttaagcggtgtacatgcaccgggagtaaaaatgtcaatcaaagatactttccagatcgcacacaatctgatgaaggcacatggtcaggctgttatcaatctgcgtaaatatgcagtccgggatatcaaagtcggatacgcaccgaccggaggtgtcgcttatccttatacggataaaccggaggacattgaagctgcgaaaaaagtatattttggtttctataatccgatggataactggacctggaatgtagcatggttttcggatcctgtatttttagggcattatccgaaagaaggattggagaaatttgcgcagtatctgccagagatcacggaagaagatatgaagctgatccatcagccgcttgattttatgggacagaatatatacaatggttactatgtccgtgcaggagagaacggtgaaccggaatttgtggaccgtgaaccgggatttcctaagacaggagcagactggccggtaacgccggaagctttttattatggtataaaatttctgacagagcgttatccattgccgctttacatcacggaaaacggcatgtcctgtcatgataatatcagcgcagatggcagggtgcatgatccaaaccgtatcacgtttctggattcctatatcggagccatgcagcgtgcaagcgatgaaggtgcagatgtaaggggatatttcctgtggacatttcttgataattttgagtggtccgatggatacaaacagcgttttggtatcatttatgtagactttacaacgcagcagcgcattgtaaaggattcggcattctggtatcagaaagtaatagaaacgaatggaggaatacttagtatgaatcaggcaaataaagatattttatttttagacccggtatgtacgcacaatatctggggcggtacaaagttaagagaggagttcggctatccggtagagggtgatgacatcggcgagtgctggggcatctccgcacatccaaacggagacggaaccgttcgaagcggcgcattttccggcatgaagttatctgctgtatggaaagaacatccggaagtgttcggcaattacgactgtgaccgtttcccgcttctcacgaagatcattgatgcaagagacgatttaagtatccaggtacatccaaatgatgattatgcaaaagtgcatgaaaatggttcttttggaaagacggagtgctggtatatcatggatgcaccggagggagcaacacttgttatcggacataatgcaaagacgaaagaagaactttccgatatgatccatcagggaagatggaaagaatttatccgtgagattccggtgaaaaaaggtgattttatccagatcgatccaggaacggttcatgcaatcaagggtggacttttaattttagagacacagcagaacagtgatattacttaccgtgtttatgactatgaccgtctctcgaatggaaagccaagagagcttcatgtggaaaagagtattgatgtcatcacagttccggcaaaatctgtggatgacagcgtaaaatccgcactgaatctgccggaaaatcagttgaatgagctgtattcctgcaaatattatacgatctttaaggcagatgtaaatggaaagatggaatttgagcagaagtatccgttcctgttagcatctgttttagagggagatggaatcgtgggcagcagcccggtgaagaagggagatcattttatcctgccgaatggttatggaaaagttgagctgcaggggaagatgagtctgatcgtttctactgtaaaataattattttgagatgaaaaatccgcaggatgtgagagcgcacctgcggatttttttgatgaacggggcagacttggtgaatagcaatgttaaaaacggggcaaaatataattatattaaatttaaaaacggggcaaatcgtaatgataatgattgaaaaaacggggcagatagtgtattgtgtaattggaggtatgaatttatgtacagaaaagattcaattgcaattggtgaatggattaaaaattcaaataaggcattattagtgacaggagcaagacagataggaaaaacatggctcataagagatgaaattgaaaagagcggatatactaagtttgaagtgaattttattgatcagccggatatggtttcctacttaaatgcagagatgagtgcggaagattttttgattaaattaaaaatgatcatgccagaagattgcaaatcgcatgaaacggttgttttttttgatgagattcagaaatgcccggaaatagtaactaaaataaaatttcttgtagatgagggaagttttaagtatgtaatgagcggatccttattaggggtagaactgaaaggtatcgcttcggctccggttggatacctgactgttttaaagatgtaccctatggatttcgaagaatttatgatggcgaataatgtctcagtaactacattagatatgctaaatgaaaaatttaaaaacgccagtcctgtggacgaatttgtacatcagaagcttttgtctatgttttttgtttatcttattgttggaggaatgccagatgctgtaaaaacttatatagaaacaaaagatattcgagaggttgacaaagtacaacgtgatataacaacgctttataaagaggatttttcccaatatgagattgaggacagaaagcttaagttaaagtccatatatgacattattcctgctgaactaaataagcagaataaaaagtttgtatttacgatgttggataaagaactgaaatttgacagatacgaaaatagttttttgtggttaaaagatgcaggtgtggcgttgccggtttataatattgaggcaccagttattccacttttagcaagcaagagcagtaatatattcagacttttttcgagcgacattggattgttgacaagtgcatatccggcagaaacaaaaatggaattaattaataaaaacggagaagtgaacaacggagcacactttgaaaatgctgtcgcacagcaattaacggcgaatggttttataccatatttctgtaaaaagaaaaatattggtgaaatggattttgtgatagaaatgaatggaaaagttgttccgattgaagttaagtctggtaaggcatataaatcacacaaagctttggataattttatgaacataccggattatcatcttgagaaagcctatgttttttccgttggaaatgtagaaacagaaggaactgtgacatatcttccaatctatatgtgttatctgttaaaagagcagaaactcggtcagatgatcgtagagttggatactactggtttgtagatcaaaaaggttattattatatcatagatgagtatgacgttctgttaggctataaaaaggactgtaaggttgtgattggagagtagatttaaagtctcaacgtagaaagctatgcctgcgttgagacttttttctagtgcagtgacctgttgctatttagaaaaatgatgtactggtgcagcacaattataagatgtctaatccagcctttaggagagcggcatccacaacgtgctcaaccagtacggaggttgtgacacttccgacaccgcccggaacaggagtgatcgcatccacaacaggttctgcgtcggcgaagttgacgtcaccacagagcttgccttcctcgtttacgttgatgccgacatcgatgacagtctgaccggcgcgcaggtagtctgcgccaatgacacctggtcttccggcggcaacgatcacgatgtctgcttcttttacaacggatggcatatcttttgtttttgtgtgacagatcgtgacagttgcgtttttctggagaagcatcatggcggctggttttccaacgacgggacttctgccgatcacgacagcttttttgccggagcagtcgatgccatagtgatctaaaatcttcatgcaggcactcggtgtacacggtgcaaaaccggtttgttttccaaggaaaacagaggccatggatcggtcagtgatgccatcaatgtctttttctacggcgagcgcgttgatgatcttattttcatctaaatgacgcggcagaggacggaagagtaatacgccgtgaatatcgtctgcctcatttacctgtgcgatcgtatttaaaaccatttcctctgaggcatcttccggaagcaggaatttttcataggaaacgccaagagtttcacagcgtttagtcgcaccgcgctcgtaagaaatatcatcttctctttcaccaatgcggatgatgccgagttttggtgtgatatgatgtgcagtgagcagttctgttttttttcggatttctttatttaaagaagcggtaacttcttttcctgataataatttagccattggtacctccatttttgcaagtttgtatctctgtttttatttttgcacatagattgtttgagaaaatgtacaatccatgtttatctgatttttgagcagacccgattgaaaatctcgtcagccttctgttcgtatttttcacgcagttcatcagcttccttattataggaagcggcagcttctttgtcagccatggattttgtgttgatgtagatatttaaggatgccccctgaagagcagattttagcagcgtggcgccgacaccggcatcgctgatggcaattttactgcccttttcggcaaaggtttcaatcagatcgattgcctctgcgcaggtccgcatgatctcaagtggaacttcacaggctcccactaaggcggcttccattacttctgcctttttttcaatttcttccggtgtgctttttggcatgccgtaggcggcacttaacggttcgaaagcttcggcgtctttttccacgagatctaaaagccgtgccgtgatctcgtccgcttttttcttacattgaatgatatcctcttccacagcggcataggtcttttttccaacggtaagactcccgaccatatttccaagagcgataccgatcgcgccggcgagggcagcggcacctccgcctcccggaaccggagacttgccggataaaacggtgataaaatctttacaggaataatctgtaaagcatgaatttgtctgatgttccatgatattcctccattgcacattattctccatacctgtacggtattttttaaccattttcattcgataagttacagtgattgctttattctaacatattgtaattttaaatgaaatagaaatcctgtagcccggtactttcgtacattaaaaaattaatgtatgaaatcaacggaaacagttgtctttttaccggtttttgttaaaatattagtagagttacctgggataaagcaatagcacctgtgttattgatgtacacatgaggaaaaggttatgaaaaataataaatggtatgtgatcagcacgtttatacttggatgtatagtgataaattttgccggcaggattttgtctgacaggctgcagctgccgttgtggcttgattcttttggaacagtaacggcggcgtatgtgctgggacctttctgtgcagctatggtcgggatgacggtaaatcttacctatgggattttatattcctggacaaatatgttttacgcagtggtcagtgccatggtcggcataacgaccggcatatgtgtgaaaaaaggattttaaaaaatctttatggagtactttcaacaagttttttaatagcggttttatcggtgacactttctgtcccgcttaattatctgtattgtgatggttctacgcagaatatctggggagacggtgttattgagtctatggaaaaagttggattcaacagctttttcagtcactgtatgggacagttttatcttgattttcttgataaggttataacgatcgtcttagtattttctcttataaaattgcttcagaaaaaaattgtatctaaaagacagcatactttgctcatgatgtttctttgtatattggcgcttggtgtgatccggggagagacagtaacggccaaaacagttacagaacaggaagattacagtagttatcttcagactgtttatggcagggaaaatggaataccgggtggatgtgccaatgatattgtgcagacgaaggatggcgttttatggattggaacatatggcgggctgtaccggtataatggcacaaaatttcaatggatcaatgaatatgaatcgataaaaaccgtgaactgtctgtatacggatgaggaaggcagactgtgggttggaacgaatgacagcggactttccatctttatcaatgatacggttgcaaatgttattactgaaaaacagggacttgcatcggattcggtgcgctgtattacacagtgcgcagatggaaattattatgttggaacagccggggcactttccattgtcacattagcaggtgggttaaatgtgaaaaagacgatggaagatattgtgtatgtaaaaagtatggatgcagatgcaaatggaacagttgcagcagtaaccgatgatggaaaactgtattttatcaggcagggaaagatcatggatattgtggagccatccgagggagctgatttttcctgctgtaagtttgatgaaaacggacttttgtatgccggaacttcacagaatgagatactttgctatggctgtgatacgggagagtggaaatacagggaaacgaaaggttgtgaagaattatccaatataaagtcactgtattttttagatgacggagccatgtttgtctgtgccgataacggagtgggatattttgtagaacagacagattttaaaatgataaatacagatacattcaacagttcgattgatcatatgctgatggattatcagggaaatctctggtttacatcgtcaaggcttggcgttcttcgtttatgtaagtcggtatttacatcattgcagacaggagctatccaggaaaatcaagttgtcaattcagttacgaaatggcagaacaggttttatataggaacggacagcggattagaggtaatggatgaagagaccggagaagaatatacggatgatgttacggaaaccttagctggcacaagaatacgatgtattcggacagacagctgtggaaacttgtggatctgcacaacgggaaagggcatttatgagattacagcaaaaggagagacttttgtctatgataatgccagtggggcaaatggtaataaataccgtaccgtcgaagaactaaaaaacgggacgatacttgcggcaggagatgcgggacttacatttatccgggatggggagattacaaaagtgaccggtgaatcagatggacttacggtaccgaagattctttgtgtattagaacaggaagatggaaccatatttgccggcacggatggaaatggaatcgcggtgataaaaaatggaaaagtggaagatgtttacaacaaagaggatggattaagctcagaggtgatcctccgtatggtgaaaaatgaggatggaggtgtatttattgtaacaagtaatggaatctgttacatggatacggaaggaaaaatcaggagtcttgataaatttccttattataataattatgatattgtggagggaatcgaccatactttgtttatattagggtcagcggggatctatgttgtggataaagaggagcttttgtccgggaggaaattagagtataaactgttaaacagtgatgccgggcttaaccgggcgctgacaccaaatgcatggaattatgtagatgagaatatgaatttctatttttccacagatacgggcgtgatttgtatggatcttaaaaattatgaggtttccgtccgttcctaccgtatgcagatgaaatccgtaaaaatagatgatgtatcgcattttgtcagacgtggagaggtgatctatctggaaaggggagcagaaaagtttgagatatttccggaaattatcaattattccgtgaatatcccttatgtaagtgtttacttagaggggtatgacagtgagccgcaggtggtgtcccaaagtgagatgtccagtgtgatttatacaaatcttccggtaggaacctataagtttcatattgcggtgctggatcataagggacagaatccggtagtggaaagtgtgtataccattgaaaaaaaggcagagatctacgatcactggtggtttgtggtttatatagtggcagtgtttacgttagcagtagcttatctgacctggatgatttttcatacacaggtgcagagagtgatcaatcttcagaaaaaggagattgaactggtaaaaaagcagctggaaatggggaatgagacggtacttacgattgctaagacggtagacgctaaagatgtaaggacgagtcagcattctgagcgtgtggcagaatattccgtactgatcgcaaaagaacttgggtttgatgagaaaagctgtgaggatctgaaaaaggcagcacttttacatgatatcggaaagatcggtattcccgaccggattttaaataagccggggaaattaacggacgaggaatatggaattatgaaatcgcatgtgacgaaaggtgcggagatcttaaaaagtttcacgatcgtagaccatgtggaagagggtgccttatatcatcatgaaagatacgatggaaaaggatatgtgcacgggttaaaaggagaagaaatcccgatcaatgccagaattatcggaattgcagatacatttgatgcaatgacggcgaatcgtgtttaccggaaacagttggatatggcctatgtgatacaggaactgaaaaatggaaggggaacgcagtttgatccaggacttgtagatgttatgttaggactgattgacaatggaaagattgacatatgtagtctgtacaaagaacatacacatacagatcatagcagggaaaaagaggaggagtaaggtgaaaaaagtatatcttgtgacattgtgcacctgtctggttgtgattgctcttgtgtcggcatctgtatactttctgagagacgaagaaaaagagatcactgttggttttgtgtatgttggagatgcgagtaccgcatataccagcaattttattgatgcgcaggaggcaatccagacaaaatacggggatcaggtaaaagtcattgcactcaataatgttgcggagggaacggaatcagagtacttacagcagcttgtggatgccgggtgtgacctgatttttacgaccagttataattatggaaccgttacgaaggagtttgcagaaaaatatcccgggatcgagttttgtatggcaacatgtgcgaatgcaaatgaagaacctgttttaaaaaattatcatacatttatgggaaaaatttatcagggaagatatacggcgggagtggcagccgggatgaaaatgaaagaattgatcaaagaaggcgtgatcacagagcagcaggcaaagatcggatatgttgcagcctatccttatgcggaggtgatctccggatatacggcatttttgctcggagtgagatc

SEQ ID NO: 5161 - DNA, 362 bp, Unknown
  gut microbiota DNA sequence
aaacaaaataacctgaacatttacgggaaaaagctgctttcgctgccgtttccccagtttgttattttttataatggggttgaaccgttggaagataataaagattacatagagctgcatctttcagatgcgtttatatgtgctgaatcaaaccacctgacaacaaatgctgcacccagacagccagtcgttactactgatatgcctgtttctgatattgatgtccctgactccactgcgaagaatacccctgactctgtcagcacccgtccctgcttagagtgtactgcacgggtttacaacattaattatggacacaatcaggaattaatggcacgatgccggactttagaggaatattc

SEQ ID NO: 5162 - DNA, 513 bp, Unknown
  gut microbiota DNA sequence
ccgtccctgcttagagtgtactgcacgggtttacaacattaattatggacacaatcaggaattaatggcacgatgccggactttagaggaatattccattctgatcggcagaatttcttcgaatgtcagaaacggtattccattagaaccggcagcggatgctgctgtacaggaatgtatcaggaacggtatcctaaaggattttcttatcaaacacagatcggaggtcgtaggtatgttattggaagaattcgatatggatgagtatattaagatggaacgcagggacagttatgaggatggacatgaggatggcttagccgagggcaaacgtcttgagcagttacacgtcgtccacaacctgtttcaaaaaagcatccctgccgaaaactgcgccgacctgcttaatgaaaacacagattttgtcaataaaatatattcactgtgccatgctcaccctgactggtcagatgaagatatttacaatgcattaaaagaaaaataaagctttat

SEQ ID NO: 5163 - DNA, 2276 bp, Unknown
  gut microbiota DNA sequence
gaacatatggctcttcaagatatgcaaggtcttcggcagttaatttaatgtcaaatgctccggctgaatcatccagatactgcgttttggttgccccaataataggcgatagaattccctttgcccactgccatgcaatggctatctgggacattttgcagttatacttttcggcaagctccgctacacgtttaactatctgcatgtcttccgcttcagtcttatcatattttcccatggcaaccctatccgtggttccacgaagagactctgatttccactgtggtcttgccagatgtccggctgcaagaggactatacggcattaacgaaactttcatttgcttacaaattggtagcaattctctctcatcctctctgtaaagcaaattataatgattctccatcgcagaaaatggtgtccatccattgtctcttgcggctaactgcatattataaaactgatatccatacatggcagatgcaccaagtgccctgacctttcctgcttttaccagatcgtgcagtgcctccatagtttcttcaattggtgtatcatagtcaaatctatggatgatatataaatcaagatagtcggttccaagacgtgacagagttccatctatttccctcatgattgcctgtcttgataaacgaccttcattaaaatataccttggatgcaatcacaacctgatttctcgctacatttttcttcaatgctttacctaaatattcctcacttgttcctgctgaatatccatttgctgtatcaaaaaagttatatcccaaatctagtgcatgcttgataacattctcactttcagcttcatccaacgtccagtcatgcatggttccagctttcccaaaactcatgcagcccacacataattttgacacttctatatctgtatttccgagtttaccgtattccatagtgctctccttatcttaatccagcgtactctttctccgataccgcctcacaccactcattggaacaatccactcccggcacctcaattgccagatgggaaaaccattcatccggtgctgcgccatgccagtgttttacatctaccggaatgttaatacagtcacccggtttcatttctaccgcatccctgccttcttcctgataaaaccctcggccggctacacatactaagatctgcccgccaccgctttttgcatgatgaatatgccaattattcctgcatccgggttcaaatgtcacgttgaaaatgccaacctgttctgtggttatcggtgcaaggtagctttgtccaacaaaatattttgcaaatgcatcatttggctctccaatcggaaataccatcgatttcgcatgtgctctcataccttcatcttcatatggaagatctccttccttcggctgccatacttcctttgccagattaaaaactgcccagccctttggccagcccgtatagaatgccacatgagtaataatcgctgcgatttccttttgtgttacaccatgttcttttgcattctgtaaatgatatattaaagatgaatccgttatcccggaagacatcaacgccaccactgttataatgcttctggtcttaagatcgatatcctggttattccagttctcaccaaaaagaatatcatcattaaaatgcgcaaattccagcgaaaactctttcaaagcattccttcctgctgtttgtgtaattcttttcatttcatccaccttccttacgaaatactttttatccactctgcaatttcctgctttgtagccttattaagtactttaccttctactatctctgcatcaggtgcagatggcttaagctcacttaccgtatttccaaatccacttccaccggaggttgcaaacaatacaatctttttgccggagaaatcatatttctccaaaaatgtattaataattgttggtgctatataccaccagattggaaagcctaatataatctcatcgtacttttcaacctgagcatctggattagatatttccggtctgaactttttgtcactcatctccacactgcttctggattttttatccatccaatttaaatctgcctttgaatatggttgttttggcatgatttcatataaatcagcttctgctacttgcgcaattatttctgctattttcctagttgttccactggcactaaaatatgccactaattttttacccataggtattcctcctaacctcgttccaataaaaaatgtgtaaagtatgttacattcataccttacacatttattatat

SEQ ID NO: 5164 - DNA, 1859 bp, Unknown
  gut microbiota DNA sequence
ggcattagaaacaaatattgaggcgcagacacagggttatacgttcaccgatgatcttggacgtgaggtgacagtgaaatctgcagatcgtgtggcagcgctgatcggtagtttcacagatgtatggatgttagcaggcggaaatgttgttgcagcagcaaatgattcctgggagagccttggtttagaacttgatgagagtgtggtaaatcttggaagcattttggagccggatgtcgagcagctcattgcagcggagccggatcttgtgatcgcaagtgcaaatacggatgcggatgttgcattggaggaaacactgacaaaggcaggaattaccgttgcctattttgacgtcgcgaattttgatgattatttaaacatgctttccatctgtacacagattaccggcagagatgatctctatcagaaaaatggtctggatgtgcagaaagaagtggaagaaatgaagcagagagcggacggcagtaatccgactgtattattccttcgggcagcatcaagcaatgtaaaggcaaagggcagtgacggaaatgtctgcggagaaatgttagcagaccttggctgtgtgaatattgcagacagtgacgagagtctgttggatgatcttagcatggaggcgatcattgcggctgatccgcagtatatttttgtgacgattcagggaaatgacagtgatgccgctatgaaaaatgtagaagaacttctgacctctaatccggcatgggcatctttgactgccgtgaaaaacgatcattattatatccttgataagcgcttatttaacttaaaaccgaatgcaaaatggggagaggcttataagcagctggcagatattttatacccggagatgaagtaagaaaggttcggtttgaaaatggcatattttccgttttttattgatatagaaaataaaaaaggtctgatcgtgggcggcggcaggattgcagcacacaaggcagaaaagatgaagccgttcggtgcaaagattatcataatagcacctgatatcatggaaaaattaaaacaggatccggtatttttgtgcgaggagcgtgcatttgtgccggaagacatcgagggctgtgcatttgtcattgcggcaaccgatgacagagaattaaaccacaggatcagtgcattgtgtcaggaaaaagggattttaatcaatgtggtggatgacaaagattactgcgtttttctatttccatcccttgtgaaagagggaaaactgaccgctggaatctccactgcaggagccagcccgcagattgcggcagaattaagaagccacatagcgagagaactgccgaatcagatggaagagatccttgattatttagaatcgatccgtgaacctgcaaaaaaattgattgcagatgacaagatcagagcaagatttttaaaagagacggcacagctttgcatggatgaaaaccgtgtgccggatgagaaagaaacgatgcagcggatcagagattattgccagagtgcggaacagactggattggaaaaaattgttagtctaggcatggtaacgctcgtcggtgcgggctgcggtgcgtatgacctgatcacactgcgcggtttaaatgcaatacggagagccgaggtgcttgtctatgacgatctgatcgatacgcgtctgttagaccacgcttcggagagctgtgaaagaatttatgtcgggaaacggatcggtgtacatagcagggaacaggaagaaatcaatgcgatcctgatcgaacatgcgaagaaaggcaaacgcgtggtgcgcttaaaaggcggagatccgtttgttttcggcagaggcagtgaggaaatggaagcgttaaaggcga

SEQ ID NO: 5165 - DNA, 26031 bp, Unknown
  gut microbiota DNA sequence
taatgttacaggcccgataatactgatcgcattgatcacagatggaacatccgcctgcggctgctgcacaacagtcggattgtcacccggcatacggtatactaaaacagcatatcccttgtcgatcgtctcatagatcttctttgctgctgatgcaggcagattgatacatccatgggaaccaccagtcttataaatacttccaccaaacttgttacgccaggttgcatcatgcatacccacatcgccgttaaacggcatccagtaggtaaccggtgtctcataatccggacctcttaagactgcattcatggttttataagtcagtccgaatgcacctgtcggtgtatcatgtccttttgaaagatttcctgaaacaaaatcactctccaccaccagttttccgtctttgtaaaggaataaatgctggtttgtcagattgatctcaacataagaatcaccgtaatcatgctcgccatgactgtttgccgttgtgagatataccggctctctctccacatcttttccggcttttaagtctgccagaatctgttctacttcccctccgttatcgattctccagccataaaaaccaccggtgatcgtaaccgtcgtaccgtaggaagtctttaactctttcggtgaataggcagtattatatttctttgccagtgtctttacaaaggcaaggacttcttcctcatcaatggaaactttttcgtcggttccctcagaaagccaggtactgatcgttgttccatccaatatttccttatcatccccaaagtcatatgtaatcgtaacaccgacatactggtttaatgcatcgatcaaagccagcagatctttatcatcatctccgattgcaggctctaaataacagccgctctgctccagatcaacggtttcatccaatactaaaaccgcatcacttaccgctttcctgacttttgcgttatcgacctgtgttccataatcagccggtacaagcgcatacccgttttcttttgtataatcagaataagtcgcatccaccggtgtgcgctgatctttcatacatggtaaatttctgactgcctcatccagtttctgttcatcataagatacaacctttgccagttcaaactcctgcttctggaacatcaggatcagccacgcaaaaccattctgctcctctaaaagtttctctatttccccctgaaataccggctccatatcaatatccgaacctgcaatggttccatttttatcctcgcgtgcagtaactgtcagattgtaatttttcatctcagtccggatcgcatcctcgactttttccacattgctgccaccgactgcaatcccatcaatagaagttccaaaacaaaaatgactttcaaaataaatcgcaaacccgacataaatcacagcaatcgccgtcataacacatgtgagcaccagtcctgtataactttttgctgacgcacctccatgcattttccgcttgtttttctctttcatttttctaaatatcctttcatcctatgtgtaaagatatgttgtattgcataaaatatgctaacggacacctactctattataatatccggcaaggtcttgtcaacaaattgtccaaatcgtaacatttaattaagaattcgttcttttttcgcattgatctgtaataaaaattaccgtcaaactccccaaaaacacccgtcatagcttaaagttttcttaaattttaaataatctttcttaaaataaggaaaagggaattgtttctaaaaaaatgctgtgctataatccctatcgttgagattaatgaaaagagggtgaaaccgtgaaaacgaagacacgcgatgcggtcaacgcatttattgagagaaacaaacatgctcttcttctgctttatttcatgatttatctgccatggtttggtcatttagagagaaccgttaccacgcattttcatgtgatccatgttgcactcgatgattatattccattttgtgaatattttattattccatactttttatggtttggatatgttgcgtggggacttggttacttctactttaaaaataaagacgaatatttccgtttatgtaccatgttgtttaccggaatgacgatctttttagtcatctccaccatttatccaaacggacattatttaaggccgactacttttgcgcgggataacgtgtttgtacatatggtaaaatgcctctacgcaacggacactgcgacgaaccttttcccaagtattcacgtttacaattccattgcagtcaatttagccgtatggcacagtgaaaatttccgcgataaaaaggtcatccgtattggttctgctgttcttatggtaagcattattttatctaccatgtttttaaaacagcactccgtatttgatgtggttaccggaatcattatggcagtcttcatgtacatgcttgtctatgtacagaatccggcacgcatgacggctggtgagcgcaaatatgagcgcaaacttcaccagatctaaatacaaacgttatgtttcctgaatatttgattcgttttaaaaagagtcataaccgattttgccggttatgactctttttcattcaaatttggagagcctctaaatttttctgattttcactctatctgaacctttacagctcacacgcacatccggctgcatattttgcacagatcgtcattgtactctcatcatacatcatgcgctctgtcctctggatcggtgtatactcccttacatcctttgcaatatgatcttcggcgacaaccgcatcaaattcatatccatctaaaaatgtgccgactttaccaaaataactgccgcctccggctgtcgctaaataaaacgcttccgcaaatgtcagcggcttacttttctcatcaatcagacgccagtacatttttgatacctgtaccgctaatgtcaaagcttttgccatggaaagtgaagatccgcccgccacgtcggaaccaagtccgaccgcaataccttcctctaagaactttcggaccggtgcaatgccggaggaaagatttaagttcgattccgggcagtgtgccacatagacaccgtgttctttcaaaagatccatctcatcctcactgtaaatacagtgtgccatgactgccgggtgctccttatctccgaacatgtcaaaaacagcgtaggcatctgcataatttttcgctgccgggacaagctcttttacccatgcgacttccgatgggttttccgacagatgcgactgcacgcggagtcctgtcgttttctgcagttttgcaagttctctcatcagctcatccgtacagcttggaataaaacgcggtgttaagatcgggtttgtacgctcatattttccggctgtctcctcaatccactttttcgtatcttctgccgcagcagacgcatccgcctcacagagattctcaccaccgttacggtccatatttaccttgccaacatagcttacgatcccgctctcctccaaaagatccatcaaagcaacggttgcctctctgtgaagtgtcgcaaaaatgcaggcacgcgttgtcagactgtgctttaaatcagacacaaaacttccatatgctctttttgcataggagatatccacatattttgcctcttccggaaaagtatgcacattcagccagtctaaaagttcaagatccatgccaagtgcccggaacgtatactgtggtgcatgcacatgcagatccgtcattcccggaaggatgatcttatcaccataatcggtcagcggcagtgtttcatactgtttcggcaacttttcaaatgcgccgcggcagataccgttttcacatacaacataaccaccctctatactgcacagttccttgttttctcctgaatatacgatatttccctttaaaacaaaacttttcttttccaatatgttctctaatccttttcttattgtcttaccataattttaaaatctgaattgcagacttcattaccttatacttcacgtcttccaattctgacgctgcacattttaactctttgcgtatctcaatatgctgcgggcagtgtttttcgcattttccgcagccgacacactgggatgcgcttgcggtgtctttccggaatgccgtacactgtaaataatctttccgtcctgattttttcccttccgaatacatcgcattataacagcggaatgttcccggaatatccactcccctcggacacggcatacaatacccacatccggtacagccgactttgacatgctttttgatctcttctttcacctgttcgatcagtgctgcgtctgatgccgtcagacagcccacatgggactcagatgccgtctttaggttctgctccaccatttccatggaattcatcccggagagcacacaggttacttctggctggttatagagccatttcagggcaagctccgccggtgtacgtccttccttgtcagcgcggaacaatttttttgctgactccggtaaaagatttaccagtctgcctccgcgaagaggctccatgatgatgaccggaagtccttttgcatttgcatagcgcagtccttccacgcctgcctgtgagtattcatccatatagttgtactggatctggcagaaatcccagtcgcaggcatccacgagctgtttgaacatctcggtatttccatgataggaaaatccgatatttctgatctgaccggacgctaatttttcctcgatccagtcctgcatgccgatcttttttaatttttcccaggtcggtatatcggtgagcatatgcatcagataataatcgatataatcggtttttaatctgcgcaattcctcctgaaacatcttttccgcacctgcgacagacttgatcagataatgtggcagctttgtcgccagatagatctgctccctgcagtggttgcggtctaagatctctccgactgctgcctcattgcctgcatagacataggcagtgtcaaagtaattaacacctgctttgatcgccgccatcacctctttttccgccttatcaagatcgacactgctgccgtttttagtaaaacgcatacatccatatcctaaaacagacaattcatttccttttttatccctgcgatactgcatcctttaactcctccagttccgctaaccatattgaggcacacgcatcggacggcatacgcagatccccacgcggagatacagcaacacttccgacttttggtccgtccggcaggcaggaacgtttaaactgctgcgcaaagaaacggcggtaaaatgtctccagccacttaaaaatcgttgcatcgtcataagttccggcaaatgcctgttttgccagacggtaaacctttgccggtgcgtaggaaagacgcagcatatgatacagataaaaatcgtgcagctcgtaagggccgactaagtcctccgttttctgtgaaatttttccgtcttccggcggtaaaagttccggggagacaggtgtgtcaagcacatcaagcagcacctgttttaaagtctcatccccacaggtatccgcataataacgcaccagatggcgcaccagtgtctttggcaccgatgcattgactgcatacatagacatgtgatctccgttgtaagtcgcccagccaagtgcaagctccgacaaatctccggttccgatgaccattccgccggacttatttgcaatatccatcaaaatctgcgtgcgctctctcgcctgtccgttctcgtaggtcacgtcatgcatcgacggatcctgtccgatatcccggaaatgaatgttgacggcatctttgatatccacctcgataaaatcagctcccagacagcggatcaatgatactgcattatcgtaagtgcggtctgtcgtaccaaatcccggcatggtcactgccttgatattactgtgatccattccgagcgcatcaaaagcacgcacggtgacaagaagtgccagcgtggaatcgagcccaccggaaattccgatcactgcagacttacagtgtgtatgctctaagcgttttttcagtcccatcgactggatcgataagatctcctcgcagcgcagtgtacggtcgcgctctccggacggcacaaacggcatcggatcaatataacgtgtcagctttgtctcttccatctgtaaggaaaatacattttcacgatataccggctctgtgaccgtctcaaatgttgtcattctgcggcgctcggacgcaagacgggacacatcgatctcggtggatatcgtctgtgcgtcaaaaagttctgactccgctaacaaacgtccattttctgcgatcaggttatgcccggaatagaccacatcctgtgtggactcgccgtcccctgcactcgcatagatatagccgcagagcagtcttgccgactgtccttttaccagttccctgcggtaagccggttttccggtcgtctcgtccgatgcggaaagatttacgatcagcgttgctccgtgcatggcatgtccgatgctcggcggattcatcgtccagagatcctcacagagttctgctgcgatcacaagttccggcagctccagacaggtaaataactgtctcgttcccatcggcaccgtcaattcttcggtcagccgtacatcggccacttcttccatacctctcgtaaaatggcgcgcttcataaaattcattataattcggaaggtaggttttcggtacgataccaagaatttttccacgatttaatgccgctgccacgttatataattttcctttgtatgcaagtggaagtcctacaaatacgattgcgtccacatctgtcgtaaatgccgcgatatgcaataattcttctttcgcctcccgaagcagcttttcctgtaaaaacagatccccacaggtataccctgtgatacacagttccggcagaacgatcacttttgctcccgcctctgccgcctctttaacagactggcagatcacttttgcattatatcctgtgtcggcaaccctgatctttggtgttaccgctgcaactttcacaaatccctgtctcattctttcctcttttccggttacgtttttacccctgcttaccgcaaccacattgccttgccttttgcttactgtccgcttgtactattttttcgcaacagcagccctttttattttgcagaacgcatttcctttaattcgtccacatcaaaatggtatgccttgttacagaactggcattttacctcgattgcctctccgtcattgatgatcgaatctaaatcttttttgctcagcgtagaaattgcacgtgaaactctctcctttgaacagtcacactcaaatgcagccgggatcttatctgagatctcaagaccgaaatctcctaagatttcctctaaaatctgctccggtgtcataccctgctctaacatttccgttacagatgcgatctccctgatcttattttccagtttttcaatgacctcatcactggtaaacggcatcagctggatgataaaaccacccgcctggcgcaccgataagtctttgtccactaaaaccccaagccctactgcggacgggatctgttcagatgttgcaaaataataggtcagatcctcagcgatctctccggtctgcagtgcgatctgtcccacatacggttcttttaaccccatgtctttgatgacactcatcacgccaagtccaagcgctccgcccacatctaatttgccctgtgcatttaacggcagttccacctgggattccataggaaatcccttgacatggccatgggaatccgctgtcacggtaagtccttttgccgggccgccgcactggatctggatcgtcaaaagatcattatcccctttcatcattgttcccatcattgccgcaccgctcaaaagacgtcccaacgctgccgtgatgaccggtcttgtgtcgtgggctcttcttgcctcctcaaccatttcctttgatgtgatggcaaatgcacgaatctggctgtccgccgctgttgctcttacaatataatcactcatattttaccctccatttcgtactgtactcataaatttctgattactccaatgatgttgggagcaaatagtgcattcaggtttcctgattgctcctcgcgatcacataaatgcgctcgctgtcctcttttaccggctctctcgtaaatgcgtcatatgctgcgacgaattcaagtcccgcctgttctaaaaggtgttttacggtttctaattcgtaggcacgctggtagtgcgtctcctcaaatctgcggtaaagtccttcttcctcccggataaaaagcgtcagatcatattcattgatctgttcttcctcatcgaaatagttatcccagatgaagcttccctcctcgcggttctcagcgattgtcgtctcgcctaagagttctctgtatttatatactgtgttcagatcgaagataaaaataccatccggatctaaatattcgttgacacggtaaaacagggacaaaagatctgtctcttccagcagatagttcatcgaatcacagatgctcacgactgcacgcacgcttccgtacagttcaagttctctcatatcctgtaacagatataagatctcatcctccggcatctcctgatatccggtctccgccgcgatctccaacatttccggtgaattatccacaccgatcatatcgtagcccgcttttttcaacaatcttgtaatctttcccgttccacagcctaaatcaagtactgttccgtcacagatcccatattctttcagaagtcctataatatacctgctccactcttcatagggaacattatccatgaacagatcatatacctgcgcaaaacttgtatatgcttccaaattataatctccttttatcgctgttactggcaagtaccatcttatcacaggttttagttgaaataaagcaaaaaagaatctatactattagcagtatgtcattttttatttgagaaaaggattttgatatgcccgaaaattacgatcactacatcagcaaaaatatcaaggcattttataaacgcagacttgcagctccgatcatttacctgatcgtgctcattcttgcatggcactttttttcgctgtccgctgtattttctccggacattttgcccgacgacacctcgttagagaccgctttccggggtggtaaacagtatataagcaccacacttttcgatttaaaatttaccggatatacccagtccatcttcggtcacaccaacggttattattattacactatgcgtgacgaggaatgtatcatcgtattgttatcgccaaataccagtgaggagggtctgccttccatcgaagaagtcaccatcaaaggaaagatttcaaagggaaatgaaaatttcgacaccctgctttccaatctgtccaccgatttaaactggacggaaaacggtatccgcaacaaggtttcttcctactatatcagcgaaccgggatttaaccacgttggaaactggatcctgtttgcagcaattttcattaccggaatttacgcattgctctgcatcgtgctctctgtcatatacatgtttttcccggtgctctcccctgcatgccaggatcttgcactgtttggtaatccgaaaaagatgttagagcaggcggaggaagaactcgccacactgccgcagctcgcaacggaagatatgtttatcacggaacattttttcattgaaacttccgtctacggcaatgcgatcgtaccgatcgatgagatcatatggatctacaaatactccacgctgcacaagtttttctggtaccatttcagtatctcctacacactgcatatcagtgccaacaagcatctgtatatccagtgcccgaagaatattaaatccgacatcgacggtatcatcgattacctctcggaggcaaaccatgatattcttgtaggatttaacgagaaaaaccgcttgaaagtacaggaaattcagggaacaccgatgcattttgaaaagtttatcgctttcttaaataagcgcgtataataaattccataaattttttccaaaaagaaggagacaggtgaaaattatcacctgcctctttctctatggaaaactattttcacaaacctgttttttattatctgccgttatgacagccggcatgcttacctgcatgacgtactgatcgactcaatcgccaccgctccaccgcgcacaacctcgatcctgcggaatttagattttaacagggcgatcagctcgttgtttcttcgttccgtcagcttgcactctaagagtacactgtcattgccgatatctgccacctgcacattaaacacctgtgcgatctggaatacttccagctttcctgcctcattgacatctaatacttttgcaaataaaatctctttcatgtgaatcggcacatccgtgaggtcaatgaccttaataacctcaaccatgcggttcaactgttttttgatctgctcaaatgtgatatcgtcactggtcacacagatcgtcattcttgaaaccgtctcatcctctgtcgtaccaaccgtaagactctggagattgtaagattttccggaaaaaagaccggatacttttgctaaaacacctacctggttttccacatataatgcaatccatctatttttcatatccgtatcctctcctatttcaaaatcatctcgctcattggatttccgctctttaccataggaagtacgatctcatctgtggaaatcataaattcaatgatggtcggggcatctgtgtaggtacgcgcctcatcaagtgccgcctggatgtcctcctctttttccacacggatcccgtgtgcgccgtaactctttgccaatgcgataaaatccggtgtgtacggcggacaggatgcattcggtcccttgcagttcgccggacaggttctccttctgcgcaggcaggttgcctcataacgttttccataaaataactgctgcatctgacgcaccatgccaaggtaatagttgttgaacagacagatgatcaccggcgcttcctgcacgactgccgttgccatctcctgaatattcatctgaaaaccgccatctcccgtaaaacatacaacttccttatcccggttgccgatctttgccccgatcgccgccggaaatccaaatcccatcgtgccaagtccgccggatgtgatcagctgatgccaggaatccaactccaggtactgtgttgcccacatctgatgctgtcctacgtccgtcacatagacagcctctctaaaggtacggtttacatgctcaaataccatctgcggtgtcatgccacagtccctgcgcatctcaagcggatttttcttatcccactctgcgatttccttctgccactgctcggtatctttcgattccgcccattcaagcagcttttctaatgccagattcgcatccgatacaaccggaacatccacaacgacatttctggagattgatgccgtatccacatcgatatgtacgatcttcgccttcggtgcaaattcattcagatctcctgtaatacggtcgttaaatcttgttccgatagaaaaaagcacatcacatttgctgactgccatatttgctgcgtattttccatgcataccgctgtttcctacatagagcggatggctcgtcgggatcgcacctttccccatgatcgttgtgaccaccgggatctgcatcttctccgccaatgcgagcagtttgtcattcgcatgtgcgatattgatacctcctccggcaaggatcagcggtttctttgcggtgcggagcagtttatacgcttttttcaactgtccgatatgtaccgactcattcggcttataaccgcggatctggatgttcgacggatactccgccggtcctgctgccgtctggatatccttcggaatatcgatcagtaccggtcccggcttgccggtggatgcgatataaaatgccatcttgatgatacgtcccaaatcttcccgtctgcgcacggtcacaccgtattttgtaacacttcttgtcattccgacaatatctacttcctggaatgcatcatttcctattaaagacagtggaacctgtcccgtaaagcataccagtggaatactgtcataatgcgcatccgcaagacctgtaatgatattggtcgcacccggcccactcgtcactaagcacacgccgacttttccggtagatttcgcgtatccttccgccgcatggatcagtccctgttcatgtcttggcaggacgacgtcaatactatcctgtttatataattcatcgaaaagatccgtcacagtaccgcccggataaccgaaaatggtatccacgccctcttcctgcagcgcttttacaaataattttctgcctgttatatccatatcgtcctcccaaaaaccaaggtattttttctttcaaaaaactatatcccatctcactgggaaatgcaatgattttatttatccaatcaacccgactgattttaagataaagatccatccggtcagtgtaaatgccgctaataacgttgtcgtcacgatcacactcgccgtcagcacaccgtcgttgttcatgctctttgccatgatataacagctcggcgttgtcggggatgcaagcatgatcagaattgcgatcattttctccccaccaaatcccatccagactgcgaccggaaggaaaatgagcggctggatcactaacttgatcagagatgccgcgatcgtcggcttgatcttcgcaagtgcctttctgccctcaaatccggctccgatcgtgatcagtgcaagcggtgtagccatctgcgccacactgttgaccgtcttattgataatcgttggaaattcgattcctaaaagtccgacgatcaatcctgctaaaatgccaagaatgatcgggtttttggcgattccgatacatgcctctttgattttttgttttccatccaccccgcttgcattttctccctcaaaggtcagcacgatcacggaaaaaatattataaagcggcaccgcactgacgatcataagcggtcccatcgccgaggttccatagatattctggataaatgcaagtcccatcaccgccgcactgctgcggaacgatgcctgcacaaaagctccccgcatagtctgatcctttaaaaacagcttcacgccaccccagatcagccagaaacacgcggtactgacaaacgcacaaaacaatacatattttaaatcgaatactgccctgatatccacgcccgcaatatcacggaacagcataaacggcagtgttaccttaaaattaaaacggtttgccaccgtgacaaaattgtcgtttaacataccgatctgttttaaaaaataaccgatgaccatcactaaaaaaatcggaaacgtcacattgatactgtaaataaaattttccatctttgctgcactgctttctgtttacgtttacttattttctgactctctcataccggtaaaaataatactcaagatcaaaatacgtctgttcctcactgtctgccgttatctcccatgccggatctgcatccagatccgggaaatgtgcatccgcatcgtatgcaaaatcgatttttgtgacatgcgccacatcacattcatcgatgagctggcgataaacagattccccgccgatcacataaatatcttcgctgttatacttttctaactcttcatgtaattcttccatatcatgcacgatcagtgttcccggaacccggaactttttatcatgtgtcagcacaatattcgtccgtcccattaaaggcagtccatttggaaatgtctccaatgtctttcgtcccatcacaaccactttgcccatcgtcgtctcacggaaaaacttctgatctgccggaatccggactaacaattcatttttattaccgatcgcccagttttcatctgccgctacaattaaattcataaaaatcctcatttctgagcaacttattgcgaagaggcgacgagaatcttaaattctcggaggcatgtttttttatgccttgccatcaaagctatttgtttttgctcagaaacaaatagccgtgtgaaagatctttttttcacacgattctccattctgatcactgcactgcttttcaagcatcatgctcttatcccgcgcacagtttcttctctctcaaactctcattttacccaatttccacgaaaatgacaaggtgtatttctattgctttttctaacagaatggggtatattatcattatgtttatttgatttttatccatgctgggcatgtgaataataaaacggaggatgattatgagtcaggcaaaagttgaccgctataaagaagagaaagcaaaccgcaaaaagattcttgcaaaagaaaaaagaaaacgtatcgcaggcaccatctgtggatggttaattgcattacttatcgtcggatgggcaggatactccggttataacgcttacgaaaagagcagaccgatcaaaacgatctatgccgatcttgatgctatcaataattacatggatacgctcaacacagaagaataacttttttacacaaaaaggttccggtacatccggaaccttttttgattcttgacaacacacagttctcaaacctctcattctttgattttaaactgtgttaatctgcctctccctctgcgatctccgctttcgcaagtgcattttcaatcgcatttaaaagtacaatcgatgtatactgattatccgtacgatatgtaatcccttccgtcgactgctgttttatcacctgttcactgacattttccaatgccggctccataagcggatacattgtcgccactgtttcatccagactgaccagggaaatggattgtatacggttttcatctacaatgacctgtacatcggctgactggctgcccatcattaccgacgaagtgtatacgcctgccgtatactgcatcgttggctctgcatcgcccttctgttttttaggtaaaaacatgaaaagcagcaatatgaccagtacgatcccaagtccgacaaatatcgctgtatagataacctccttcatatgaaggaccacgatcctcgtctttgcgctcaccctgtacctccatggtatcgattgttatattgtatgagtgcgaagcatattacatgcacgcttcttttaaacattcttcatattcttttaccggcagtggacgcgaaaaatagtatccctgaatatcatcacagtccagattgcacaaaaacatcagctgctctaccgtctcaacaccctctgccgtaatttccatgccaaaactctgtgccagctttgtaattgaatttaacaatttctctccgttatcgtcccctatgtaatcgacaagacttttatccagcttgatcgtatcgaaatgcatacggtttaaagctgcaagggatgaatatccacttccgaaatcgtccagaagtatcttaaatcctgccgtgtgaaactgctctaacagattaaatatttcattattatcaatcgttgcactttctgtaatctccagctgaatgtatttcgaatcaaggtcaaacgaccggataatactttcatatttttcaacgacacttgaataatagaggctgacacgcgaaatgtttaccgaaacaggaagcatcttctgtccctgtttctgccactctttctgctgcctgcacacagctcggaatacatactcatcgagccggatgatatttccattccgttcaaacaatggaataaacttaagcggcggaatcagtgctccatccgccctgcgccatcgcacaagagcctccgctcccacaagctttctcgaatgtgcactgtattttggctgataccagatttcaaactcttcgttttcaagcgctgtttcaaaatgttcttctaattcacggttttcctgaatactctcatggttcagctcatcataaaatatataatgcctgtcacgccttcctttgatctgatgctttgcctgcactgcatttccgtataaaggatcgatctcatctaatacgatcgtatgaaaaattccaaacaccgggaaaagatttggtatttccagacgttccggtatctcttctatctttcttattacatgttccagtctttgtttgatgttttcctgattttcatccatccagaacaatataaaccggtcggcattgacatgcgctgccagttcattttctcccgtttcggtttcaaaaatctcccatatgacacgcagcacctcatcaccttttttgactccacaggtgctgttgatcagcttaaaatctgtcacatccatagcaatcagccatcccacaccgtcttttttacttttcgcgcgttccttaaatgccacaaaattatctcccaatgtaacgggatcctgatacgcaagtgtcatcagttcttttttacttttgcgccacgaataaatatagaccccgacactgacagatatcacagccagaatgataaccatcagactgttgatcgcatccatgaccacctgcatacggcttgttaaaacactttccgacaccgcagtgactacataccatgtttcaccgctttcttctattttaagcggcatatagtaatacagtgaggcctctttgcgttttggatccattccatagccgctttttccctctttcatgtcactgatcatcttatccctggcatcgtcatctctggcatcgtcatctctttcatcctcagaggcatccgtgacaaaaatattctttccaattccccatttcttactgtttccagaacctgccacgatcgtaccgtctatttttatgatgtaattaaaagcctgtccttcaaatatctcattcttcagacattcctcaaacatctcatatccacaggttccaaacagaacaccttttatcgttttctgatttttttcatataccggtacactgaatacatttatggtttcatatgaagtatcaatcctgtcttcaaatgcatccgtcaaaaagttttttccctgcatcgactgttggaaaaaatctctgtcagacatattcagccgatatccatccgtcgtttttgctgtaccatctgccgcaatatatcccatccgtttgaactggtaagtctctacgaacccctgcattttatcaacaaaaatactctcatctccatccgaaagttcccttgccagactgtcaagcagacgaaaacgcgtacctgcttctttctccacaagtatttcattctgttcagccacaccctcgatactgctcatcagctgttgctgcaaactgtttctgatctgtccaaaacatccgaataatgctattccaaaaatcagcaatattacacataaaaccgcaacattgtgtattcctgtatttttttatacatcctggcaccccataactatttcaaagtcctaatacaaatattttccatgaccattttcccatattttttattataacactcttcatttatgagtgccaccctaaaaaaacgttttcagctgtcgattttttcaaaaaattattgacaaattgcttttcccatagtaagatagaacatgtgtctgacagacagatacaaaacaatttatgtatgcgcgagtggctcagttggtggagcacgaccttgccaaggtcggggccgcgggttcgagtcccgtctcgcgcttcttttaattgtagcggaagccttgattttacaaggtttccgttctttttatgttgttgtggtcaagcttttttgtaacatttgtggccaaattcaaaaattattacatatcaagtacacctgagcccataatactaaaattcatgtcatttcctgttatttctcttcccatacatccctcaataaaatcaaagtatccatctgagcctgagtgtttttcccatgtgtcaatggattccttgattcttaacagacacattaccggaaatctatagtattctttcacttgtccctgtgacaacatatccacctggaattgttcttttaacagttccattatctcttcattcgtgtaagggtcaaatgccataagcaatgctttttcaagtctttcattttcttcatttctaaagttgcctgtgtcatatttttcaccactgcagtttccttttacatcaaataataccaatgcaatggcctcccttagtctacggctgtttgattccggaaattcgcggtgtatttttaatacatttccctccattggcagcaacagcatagcgtatgtttcttcttcgccttttcggatcttcccaaattcccgttccatctgtgaataaattttttcaaactggtataactgcatgattgtttttccttcacatctttctataaattttcttcaaaaaagcttgactgatcagccagtatatgttgcgcaagccttgtttataaacatatttcaaggaggtgcctcatggctcactcttttttagcacaattaaaagcaaccctcgataatgaaatatcttttaagaaaactcatattgcatgaaattaccattatgtacaaatccgaaatctgtatacaatttaacccccatatcagatgccgtaatctgtatcactccgcacccatattctctagcctcatttacaacacgagataataattcctttgcaataccttttcttctatattgtggttctgtaaacatactggataacaatcctatctttccatttggacatccaaaataaggcggcttctccacaaatgacattccacttgtcccaataatattttttccatcaagggcaagccaggatacaaatgttccgtctgccatatgacgggtataatagtccttcaaggcaggaactaaatcaatttcttctttagccccttcttctctaagctgatttatcctcatattaataaaagtattcagttctttttccgtaagcattttatactcaatagccatttacataatgtcctttcatgtgctaatctttatgatacagctatgtttattaatacctttatcttaaaacattttcaacatattcttggtatccctgctccaaaatactaaaagaacaactgttgtcagttaatttctgttttcgatttgttataaccatttcatatattttatttgcttttttctgaatccgctcagcattgtccatacaaaactgatattccttatttagtaacaagcggtatttttcatcttctacatctttaataaccagtctttcaatacactcctccggcactggaatcatatagttgaatcgtaaagcccccttgatttctttttcatcttccggtatacggatcaaaatattagcttcctgctttttgtcaaaagaagatacagacacataattcaagaagtttttcgaacgtttgttcatcttttattttcgcttggtatacttcttttttgttatatgtgcctttttgatatcctctttcccttcatttttcatgttaaaattaatattattgctctcaataatctctttcattttttcttctattacattagaatcaaactcaatttttccttctaaaattgcaattgtacgattaaataccttggcaacagactctttcaacattatgtttactttaggataaaaacaaacataactatccgataactcgctctttttcacaagatacaatcttccttgctttattaatggttcaaactgtttttttatatagttctcgatatcatattctgttccatcatatacgataataaccttctttttaccactattattaagtgaatctatttctttgaaatttagcagctttctcaagcggttactagaaataataatcccttcatgtttgatttcattttgatacaaaaagtatttttcaatttccttattatctatcagacaccttggcttagtaaattccaactcaatctcttctgtaactgcatcacaattatgtaatagattcgtcaatttatctgtttgttttctttctacactctcctctcgtcttacaggctcacagtcttttacaaagttccaatctcgctcaaatacattctccaatccaggaaaagttatatctttaacttgagcataaaaagcatttatatacttatctccagagtctttacttattacaaattcataatcatccacgtcattgtttttatatatcaacaattccttttttacaaaaactaacctatcatatgctacatctaatattttgtataactctcgtgaaacattatgtacgaaaaaaacactactttcaatttgatttttttggtaaatttcatttatctctgcataatttgtctctaaaaactcttttgtaatgctaatctcttcatttagacaaagatcctgcttcttcacctgcgatataattatattatcactttcttcaaaagtccccgtgatcatatcaaccataatttgattaatatttcttttttgaatagtaacaagttgtctggtttttagcgcttttctgcctctctgtgtcatagaaatttgattttgagatgtagcaagatactgctcttcaatcatatctacaattacttcttttaaaagtttaaattcaacccccataatttcagaaatctcattgatatcacatacgccaatatcaataaattttaatattgtctcataaaacaagttaatctcagccgtatctcttgtcaaacacacgacacctatttctctatacggtacataaatgtcctgcctttttatcaaatgatgattttttatttctttgggaatatcccgcgcgatagattttattatatgttccatactacttctctcctaacattcaactatccgacacccttctgactctttaatatactcaataatttgaggaaacttatttcctctaattttatagttatccaaaaacttcatatctccaacgataattagcaaacatctcgctcttgagaatgcaacatttattctcgcttctgatttgagaaaacctataccgtatggatttgaactactccttactgtcgaataaataataatatctttctgacttccttgaaatgcatctactgtatcgacatctatatcaagattctttaaagagagctgtttaaccattgtttgtaagttatagcgctgcggtccataaccagtaataatcgctatctttgttcttatttgcatcttagcatctaattcaattaatttcgctttaataatctttttttctaaattgttctgataggattttttcccattattttcatacgcaatttcatatcgttcttgtggtgaccgctttgatgtatctagccattctattgcaatatcttcatatccttcaatggataacgttcgttcctctttttcaactccattttgaatatcatcatcataaaaaacatgacttacaagcgttccaatagttggatgcatcctatactgtacagtaagtctatgcttgttatcttctggaaacatcatatataatttttcaaaaataccttgtgccaaattttcctcatcaattttatccttattgtccctgataagttctgtatctagcactggcggtaattgctgatgatctccaaccaaaataattttatgtgctttatttaacgaaaccgcaagctctggaaatgttgctttagccgcctcatccacaataacataatcaaaatctacatctctaattattctatttgacacaaaccctgtacacgttcctgcaataatcgtggtgctttttataatatacaactccacttcatcgcactgggacatctgatttttccattccttttgaatctccaatatttttcttacatgcccagattgaataccattcgtttttttctgaaattctgctattaattgataatcctttacctcaagattattattttcgacttttgactcttctaatttctgataatagttttcaaattctgcttcgtcaattccaacttctttcattatactttgtgaatatttgtcacatctctcttttactgtttctatccagtgttctttaacatctgtaatcgaatattcctttctaatttcgtcgttcaacttctcatctcgcccaattcgtaataaatccggtctctcttcactatctctaataaggtcttctaacattttatctaccgccggatgcgattgtgaaacaagcaaaatttttttaggctccatatccttatttctattattttcttttaatatttgcaatattatttcaataataacatttgttttcccagttccaggaggtccttgtataatagcaattgagtctgcttccaacgccttttgtacagctgctttctgtggcgaatcaagttgtttattaaatagatgcaattcttttgatataatactaaccgatggattctctacacctgatattattctcttcaaactaaaattacattgataatcttccttttccaaaatattcaatgcatctaattgtctttcaacattcactaaatctttgcgataatccatacatatcaaacctttagcaggcaaactaactctacccaccctttttatctgtaaaattacatgttcattttcatagatatcgttttcatatgcacctatcgtaacaggttttactttgtccttgccttttccttttcgttcgtatacaaaaagctgctccttattcaaacgctcttcatcaataaaaacacctttcttcaaacgaaatcgtaaaatatctccatctaattgaaacgaatcatatggtaatcttattatgttcttttcaatatcttccttcaccaactgtaaaaggtcgcgccatacaccatacttactcttatattcattctcaacattattattggaaatatattctgagtaataatcaataatcgtatttttaatttctatactatcattcttaggttccctatgagcaaatttcttatctacaaatcgcacttttcctacaacttgcgcatatctcttccttaatctatcgcggtcaatcggcaccacttttcgaaacttcaaaacatcaaatacatttagttcttcttcataaatacattccataaggtaattatatcccaaaaagataaacaccttttcatcatcttcctctttgcaaaaagcatacatttccagaaaattttctggcaaatttccttcagcagcctcctttactgtaaccgactgtggtaataatttaaaattctttaattctttgaatcgttcatacgccatagtaaacacaacagttttttctgtatctaaaaagcgcataaataatcttgagatatctttccgtaactcaaatatattttcataacgatcatctggattttctgccaccaattttttaacaattggcttcaattcaatatccattccccgcactgaatccatagttttttgaaactgtactgccagtggcggctgttttcctgtaaaaagataataaattactgcaccaatagaatacaagtcactcttttctgtcgcattctcactatgctgatgtacttctggtgcagaatacgcatttgtacctaatgtaaatactgttgcagaatttatcatgtcattaattttacaaattccaaaatcaataacctttacaaccttatcctctgtaaccataatattatttggattaatatctctatgtataataccattggaatgtgagatttctattgcatctaacagctgccttacaatagaaaatttttccttagatgaaagattttctatctgtaccttgcccaattcaaccccattaatatattcaagataaattactccaaccttttcacccgtcttggtttcctttaagtaatcatctccaactatactaacaatattctcacttttattaagcttgtacaatgctctcatttctcttgtaaatatagcctgatacaacggatgatcaataccatgtatcacttttcttactataaattcatctgagtcttttttctgcaaaagatgaacttcggaatttgtctgcccacgatcacttaatttatttacgactttccaatcacgaaatgtactcattattcatccccccaattatcttttcttttgattatcttttcttttgattatctacacattatttttataatatcatactacaagtcacaatgtattccatatatttttaatttctacgtcacatctccactttacctgcttcgtttttcatactacttcttacttctcttgcaagtgctgctaatgttgtaactccaacaatctcattaacaatgagtcgcaaaaactcgttttctccaataggactacataatataattacattcaacaaaatgtaaaaataaagttttgagtattgtatttctgctctaacaacttcccattcttttctcatattttcttttctctcatttctataaagttcatctttcattgtgccacgccaattattttttgattcacgcttcaatctgcttttctgcacactacgaacaactgatcttgttgatagccacgcgcacaactccgtaatcttgaaataaagacatatagaaacaaaaactatgataaatgctattgcttcatcattcaacttaattttcaaccgaagatcaacaaactcttttaaagttggcacttttattgctgcaatagaaaagagcagtaaaacagcaaatatactcaataaataatatgggaacaaatatgccacatgcttctgtcttaccaaatttagtagcttattaataaatctaattattaagtgatatggtaacattaatgccaatgccactgttaatataaaataacaactttttttctgatagcgattatcattgcttcctaattgagcaattattccgtacaagacagaatactgccccagaattatcaattcaaatgaaaaaaatacagaattttcccatacaccctttaaatcgcaaaaaataggcgcattgggtattagatagataaatatccctataaaaatatataccattcctataataaatggaattatgttttttcttactttttgtgatattaccttacaatcgcctacttgcgttttactttttttatcattctgccttctaggttctggaacagctacctcctttattatttcttcccgcttttccttccagcactgcgtaattttacctttccaacattgttttttcataaaactcatttatcctcccgtatattatttagatgttcccaaattattgctatttaccaatcataaatctctctatatacaaaatagtataacatattctattctacaatcacaatttgattatacatagtaatagcaccctagtctcccagagtaccatctttcaaataatctcatacgtcttatacaaatactgcttcataaatctctccaactccgatgccggaacccggatattcttccccaatctgacctttgggaaatctttctggttaatcatctcatacgtcttcgtcctactcagtcccagcacctgctgtacttctttcggcgttaaataccgctccatctacttcccctcctgacacctttgctattattataaggaagctcctaataaaattttattagacgattacaaaaaagaacatatacgcgttggtctggcttatactcctaattgtcaaatactctattctgattctcctttccagatttgacatttactctagcaacttttttggcgacattcttggcgacactttctggcgacacttttaatgatattcaatggaatataatgacactaaaacgaatttaagtacctatttttaaaaacgaaaaaagccttgaaatccagcaaacacgcgactttcaagaccattattgggagcaggggatgagagaatcgaactcccaccaaaggttttggagacccctatcataccatttgaccaatcccctatatataaaatgacgtatcaaatacgtcatttattttacttttttcttatgcaaaaatcaataggacttttgccttatttctgataccttcaaaacttcatacag

SEQ ID NO: 5166 - DNA, 12429 bp, Unknown
  gut microbiota DNA sequence
tatatctgttgttatctttttagcctgtcattgtttttgtctatgattgtttttcgcctgatttcagtcgattttcagtattaatcctaaaatccgctttgcgcagatctccatctcttctcttgtcagcactcctgcctcttttgcgcggagcaggctctccgggaatccacatgccatcttgatgtcatttcccgcttttacttctttataatgctcgccgcttgtccaccagtcggtcgtgaccatgccctgatagttccactctcctcttaagatgtcctctaaaagctcacggttttcagaagttctgtgtccgtttacgatattgtaagatgacataatgcaccacggatctgcctcttttacgataatctcaaacgcctttaaataaatctcccttgctgcccgctcggacactctggaatcgctttccttacggtttgtctccttattgttgcatgcaaaatgtttgaccgtcgcggcaatatgttttgactggattccctttaccattgcagatgccatttttccggtcagatacgggtcttcggaataatactcgaagtttcttccgcagagcggacttctgtggatattgactgcaggcgtcagccagacggcaatgttattttccttcacctcagcggcacctgctgcaccgacctgatataccacatccgggttccaggtacatgctaaaagtgtcgcacacggccacgccgtcgtaactacgccgcattttttctcaatgcggagtccggcaggtccgtccgccgtcataatattcgggattccatactccggcatatttccaaatccaaatgtatttgccacaccggtattcggctgtccgccaagaatatgtgcaagctcctcatccgtcatctgagccacaaattcatccagtgctatttttccttctgcaacttccataaaaatatgtgcatctttcttatatggctgcgtccagagctgctgtcccggcaatgcacggacagccggtgaaaatccatcgctttcctccctcggaacacgtttgattgcggagtaatccggatcattcggttcggactgcggcagtttttcaaaacttccatcggagagcatgcgctccgcaagtgaagtcggaaccagttttgcactaagctgctctgttacggtatcctctggcattgtaaaacaaaatacctgctctgtttcccgcacggacgtgccaagataaaactgatacttacctttttccagcacataggcagatttctgaatttttcccagatcatcataggatgcaagctgtgccaccggtgcctctaacgtcagaagctgcgtttctccctgtgctaacagtcgtgttttttcaaatgctgcaaggactctctttgcctttccaagtacgccctgcggtgcctgcgcatataactgcatgacttcttttcccggatattttccggtgttggtcacattgacactcacgcggatcacaccctgtttttcttccgcagatactaacgcacgctcgaaagtcgtgtaggaaagaccgtagccaaacggataattgacggctttatcaacccccggtattgtctcaaaatagcggtagccgacgtagatatcttctttataatcgacatattttaccgattcatggaatgtctccgatgacggatagtcttccagtttctttgcaaatgtgtcggaaagttttccggatgggctgccgacgccgcacagaagctccgctgctgcgcttccgccttccatacccccctgccatgccatcagcaccgcctgaattttttcattttctgcaaaccagtccgtatcgaccataccgccgacattcataacgactgccaccttcgggaacaactgctgcacctgttccaccatcgcgctctcttccttcgtcaggtaaaagtctccgtccggaaaaatgcgctctgccttttccagcagcggatctgtctgtaccgactcatccatctccttatcataagaactctttctgtcccagccttccccggaaaaacggctgatgcagatcactgccgtgtccgtgtacgctctcgctttttttgcagtttcttccggaaacgcaggctctactgtcattcctggttctgctcctgcctcgtactgtttttctacctctttacggtaataatcagagagtgcctcatacacttctactttttccggcagcttcttgaatccctcatacaaatttgtcgtataagcaacggttacatctccgcttccgccaccacccttgacatagtcaaaactgccttttccaaacagggcgagtctggtgcctgcctgaaatgggagaaggctttcattgttctttagaagaaccatgccttctttggcggcttcttttgatagggtgatgtgtgcttttgaggcggtgactttggtgccgtcagctccgagagggaggttgggttgataaagtgatctttgccatttttccatgattgtgggctcctttttgaaatatttggtgggtgggcgttggaggcaaaactcttccgaaggctgtgagcgttggggcaaaactcctctttaggctgtgagcgttggaggcaaaactcctctttaggctgtgaatgttgtgaggcatacacagatttagcgaaggcacgctctcgctgcgtgtcgctcgtagcggtactaagcgaccaaaatacggtcgctaaggaccgacggctccccagcaccttcttttaaatctgtatatccctcgcaacagatgcaggttgttggggcgttttgcctccaacgggttcaggttattggagagttttgcttccaacgacgttaggttcctgacgaaattagaagattttacttccaactacgtccactgataaatttttttacttctttccaaataagttgtctttcttacaactctctacgtctctgattatttatcattttctatgttcttatcatacttaccccacaccttaatttcaaggcagataatgacttgtatttcggtcgatattgacttattatgaattcagcaacaacatccgcttcactgtatcgtccggcggttttcgcacgccttcccgaaaggctcgccaaaaccccaaaagaaaggagtcgtcctatgaccacccacgagatcatcacctccaaacccaaactccccgtctacttcgacatctaccagtccgacaaccagctcgtgcccagccactggcacgcacacgttgagattttatacatctcctccggttccatgcatgtcatctgccgcgaggaatccttcctgctgcacacaggcgatatctttctggtgaattccggtgacatccattatacccgcacgatcggccgaacggaaacctacctgctgcagatcccgtttgacttttttaaccagatgcttcccggttttgcctccatccgttttcaggaatacttttctgcggaaaaatataaaaatgaccccgtattctgcgaaatgcgggatcacttactgaccatgggttacttatataaaaatgaaaaaaatggctaccagtttttatttggcagccaccttcatcattttctttatatactttatacttcttacgtcctgccacagtcacagagtaccgtctcgcaggataccaaaacgctcacaaggctgaaagatatcataacttatgtggaaaggcattatatggaaccgctctccctctcggatatctcagaccgttttgcactcaatcccgaatacttctgccgtttctttaagaaaaacatgggattcaccttcttagaatacgtcaacatggtacggctttcccatatttattctgacctcatgcagaccggcgacagcattacacagatcatggaacgccacggttttatcaactataaggtattcaaccgtatgttcaaagaagtatacggctgtctgccctcgaaagtccgccatcagtagccgacaagctgtctacatgcaaagattcagacagcagacaagcactgtccgccctcaaaattccgtcattaatagccgatcggtttatccttgcttcccaccttaagacgtgccatagcacgcgctaatgaggctttggagcgatgatactcttcaatgctctgtttctggcggagctgttcttccgcacgctcttttgcttcctgcgcacgtcttacatcgatctcctccggtgattcacaggtgtctacaatgactgttgcacggttgttgatgatctgcgcaaacccggttcccgtaacaccgtagatcgtgtttccgttttcctctaagatacggatctctccgacctccacggcaaacaccatattttcatggtgcgcctggatcgcctttaaaccatcatggagcggcaggactacctgtgcacatcttccatcgtaaaataccttatcacaggcaattacttttaagctaaatgtattcatgttcctccctcctagctggcggaaccggtattacccattgtctttgcccgctcaatgacatcctcgatcgttcctacgttaaagaaagcagcttccggatattcatccatctcaccgtcaacgatcgccttaaatccgcgtacggtgtcttttaacggcacatatttgcccggtacaccggtaaagttctctgcaacgtggaacggctgggataagaacttctggatctttcttgcacggtaaacaacaagtttatcctcctcggaaagctcttccataccaagaattgcaatgatatcctgtaactctgtgtatttctgaaggatctcctgaacacgtcttgctgtctcataatgctcttttccgacaacatcctcctcgaggatacgggagtttgactccaacggatcaactgccggataaataccctgctctacgatctttctggaaagaacggtcgttgcatccagatgtgcgaatgtcgttgcaggcgccgggtcagttaagtcgtctgcaggcacatagactgcctgtacggaagtaacggaaccgtttttggttgatgcgatacgttcctgtaattcacccatctcagttgctaaagtcggctgataaccaacggctgacggcatacgtcctaacagagcggatacctcagaaccagcctgtgtaaaacggaaaatattatcaatgaataaaagcacgttctgatgctcctcatcacggaaatattctgccatggtaagtcctgtctcagcaacacgcatacgtgctcctggcggctcgttcatctgaccaaacactaaggctgtcttttcgagtacgccggattctttcatctcggaccagaggtcattaccctctcttgaacgctctccgacaccggtaaaaatggaatatccgccgtgctcggttgcaatgttacggatcagctcctggatcaataccgttttaccaacgccggcaccaccgaacagaccgatcttaccaccttttgcatacggtgctaaaaggtcgatgaccttgattcctgtttcaagtacctcaacgaccggactctgatcctcgaaagatggcggatctctgtggatacaccagtgtttctctccctctaaagtcttgccgccgtctaaggtatctcctaatacattgaacagacgccccaatgtgccctgtccgaccggaaccgtaataccgcttcccgtagcaacaacttccatgtccttgtgaagtccctcactggcagctaacataatacaacgtactgtgttattgccgatgtgctgtgcaacttccatgacacagcgttttccgccgttgtctacttcaagcgcatctttgataaacggaaggtcattatcttcaaattcaacgtctactacaggtcccatgacctgcacgatttttcctgttttcattccgctttcacatccccttcctattttttcttctttttcttctgtgccttcgcaccgccgattacctctgtgatctgctgggtaatcgcagcctgacgcacacgattgtattcaatggacaaagtctgcagcatctcttttgcactgtctgttgccgcctgcatcgccatcattcgtgaattgtgctcactggcaaatgactccacgagtgcaccgtaaataaatccgttgacatagttcggcaccacatgctctaaaatatcctgcatggtcgtatctgccttgatctcctcctgataaatatcaacaggagctttccccatgaaatcctcttttaccagtggaagcagtttcatcatttccgcttccatggaaaatgaattctccattttcgtataaatgatgtatacctcatccaattcgttgttattgtataactccagaatacgttctgtgataactctggctctgtgcagggaaggattttgcaccgtatatttaaactcggtatctacctctaacccttccttggtaaaatactgtcttccaagctctccgacgacgaacagtttgttgttttcaccctgctcaaacagttcatgcgccattttaatgacgttatggttgtacgcacctgccagtcccttatctgcagtgatcacaatgtatcccctgcgttttttgtcgtccggaatctcctcgtgctggtcaaaataccggctcttagcatccggaatatgacggagcagtcgtgagattgcagactgtaacgcatagaaatacggctctgtattttcgagcttctgctttgcacttcttaactttgcagaggaaatcatatacatggcactcgtaatcttcatcgtatcctgaatacttttcattcgtttctgaatttccttggtatttgccatgctctatcacctgctcttaaattctttgactgcctctacgatcttttctgtaatcccatcatccagcacttttttctcgttgatggcatcaacgacatctttatgctcgattttaaagaaatccagtaatcttccctggaactctttcatctgtttgatatccacatccaaaagcagacgtttgtttgctgcaaccagtgtaattacctgatctgcgaggctcatcggatggcagagcggctgttttaagagctccatcagtcctttaccatactgtaactgctctttcgtcatatcatccagatcggagctgaactgtgtaaacacttccatctcacggtactgcgccagatcgatacggatcgtaccggatgcttttttcattgcctttgtctgtgccgcaccacctacacgggatacggaaagacctacgttgaccgccggtctcataccggagttgaacagatcactctctaagaaaatctgaccatctgtaatggaaataacgttcgtaggaatataagcggaaacatcgcctgcctgtgtctcgatgatcggcagtgcggtaatggaacctccgcctaactcgtcgtttaacttactggaacgctctaataatcttgaatgtaaatagaatacgtctcccggatatgcctcacgtcccggtgaacgctctaaaagtaatgacagtgcacggtatgccactgcatgtttggagagatcatcatatacgatcaggacatcttttcctttgtacatgaagtactctgcaagtgctgttcctgcatacggagcgatgtactgtaaggatgcagattcactcgctgtcgaggaaagcacgatggaataatccatggcaccgttctttgtcagtgtattcactaattttgcaaccgtagatgccttctgaccgattgcaacgtaaatgcagacaacatctttgcctttctggtttaagatggtatctactgcgatcgatgttttaccggtctgacggtcaccgatgatcagctcacgctgtccacgtccgattgggaacatggagtcgatcgcaagaatacctgtctccattggctgttttacggactgtctgtctacgatacccggtgcttcctgctcgatggcacggtaatcatctgctttgatctcaccttttccatcgatcggggctccaagggcattgataattcttccaaggtaagcatcacctaccggaatacctgcttttttcttagttctggttactttcgttccctctttgatctctgtgtctttaccaaaaataatacagcctacctgatcacgtttgatatcctgtaccattccgcggacaccgttctcaaagataacgatctcaccatacatcgcatgctcaataccataaatcgttgcgataccatcaccgacccagatgacagttccgacttcctggtctttgcttaccatgtcatagttctctatttctgttttcaggatagatataatctcttctgaactgatagaacccacgttatcacctccacgctaatcttctctctaaccgatttaagcgccctttcatgctgtaatcttcttctatatctcctacccgcagtacaaatccaccgatcagttccggcttcttttccaatgcaagcgcaactttatctttctgatatttctttgcaagatatgccttcatctgtgccacttcatcctctgtcggctctaagacatactccagttttgcctgaaggataccatttttctccgcttccactacatcatatgcggcaaaaatttcctcaaggagatctgcctcaccgtaatcgcaaaccaccttcagaaaatttttcattgattccggaaaaatccggtcgatcagcttatgtttgtcctgttttgacacaaccgggctttttaaactcttcggcagatcctgggtcagagaaagaatctcttttgtctcatcaaccgcttctcttgtcacaccaagctctaagagaaccgttgcataattatttgctgtctgcgtcattcacaccacctgcttttgtcaaaaactgttgatacagtaaccggttattctcgttcgtacttgcctcaccaagtacttttcctgctgctgccactgcaagaactgcaatctgtgactgaagatcctgcacagttttgtcacgttcgagttccacggtcttatgggcattctcgatgatcttttctgcttccgcatccgccacattgattctgttctcatactctgcctgtgcactcttacgagttttctcaagcagttctgcagattcctcatgcgcctgtgcaagcattccctcatactgtttctttaagtctcccgcttctgcctttaatttgttggcatctgcgatctgaccttcgatcatctgcttacgctgctccataacattcgtgacaggaccaattaaaaacttacgaagtcccagatacagaacgatcaggttaatgatggtaaagacgacgttccaatctattcttaataattgcattctctaccagaccctttccttaacctaagaataagataattaaaattgcaacaaccataccgaaaattgcagtaccttcggcaagtgcacaaccaagtaataatgcttttgtgatctttccgtctgcttccggctgtcttgcgatagcgtctgttgccttagatgttgcaagaccgataccgatacctgctccaatacctgttaatgctgcgattcctgctccaattgcgattaatgatgtcatgataaatttctccttttttgtttttactttttttactcgatgctttccttaataaataaggatgttaaaaatacaaatacatatgcctgaataaatccgtcaaacaagtcaaaataaagactgagtggaaccggtactaaaagcggtgccacgatcttgatcagctccataatgacgaatgcccctaaaatgttaccaaaaagacgcatacacaatgataatggacgaataaatatctccaatatattcattggtaacataagtggtatcggttcggcgaaactcttcagaaaacctttcattccttttgcatgtactcccgaatattcgatcagcacaatactcatcaatgcaagcgcaccggtaacaccgacatcctttgtcggggatttcagtccgaacagtccgatcatattagcgactgcaatataaattcctactgtcattaaataaggaatataacgttttccttcctctccaagtaaatcgtaaaagaagttatgcaatccgccaacaactgtctccactgccagctgacgttttcctgcgttttctacacgcagatttcttcctaagaaaaatgccgctaccaaaagaactgccataattacccacgttactactaccgattcggcaaccggaatacctccaaacaccggaatcgtgaaagcagtttcacagttcagctcttccatcagcgctttcgataattcctccgtattctcacttcccttctttcctacacttcgctgtattttattgaaaatttttccacttgtcaattttttgtcagagtcaaatttttcattcctattttggtaattttatacaatttctttttatgttttttgtaagtttttttacgttttgggaattgaatatttcatttgtttataattattttatttttaccctgaattgaatccaaaatatagtccaaaatacctaaaaaagtctatatttcttatgcaatatcttttacgattctttaataaattacatattgcgctgcattccgctatatccctctccccaatcactcaaagatttttctgatcatttatctcaacaacttctctattgattctcaaccgactattgtcactcgtaatttatactcgcacattgattcatcacatcatatactaaaataaatagcttactgtactggagactttcaatgaacacagagaccagaggaacactttcccggcggggtaatatttcacagatcacaaatgctttcgtggaggaggtcaatgctttttccaacacttccaccggatatatcatcgtatcttatgcagcctcacccggacagcaatccgacaacatccagatgctccgtttaaatatcaaccggaacactgtcatcctcgattcatccggtcaggtcatatccctgtcggaaatccgtccgcaaacatggatcaatgccgttttctcttctgcaatgacacggagcatccctccacaggcaaatgcatttctgatcatggtacagaagcggcaccctcaaattgaaattgcaacatcgatcggcaggattgcaagtatcgacgccgcaaatggctttttgtacaccggcaatccaaacgacatcaacagccaggtccgctacgtcgtctcaaattccaccttctccgatccatccggccgcccgatcacactttcatccctccgccccagccagtgcgtccgcattacacatgcaaccgcacagaccgcaagcatcccacctcagacaatagcgtttcatgtgcagttattgtaaccgaatctttactatggcttcacaattttttcaaatatttaccacaatttcatcatgaacttcgtttactataaataatgtcaaaaggaaataaacctttttcacataaaacagtttcttttttttcataacaaaagccagtaaaacatcccccgttttactggctcctccttttttattcaccttatatttttgatttatcttgtcataaaattatttagaaattcagtaaatttgattttgcgggcatttttatccaacccacagtcaacccacttaaaacagcataaaaaatcggaagtgctgatttttcaacacttccaatcttttaagtaatgagacatcggggattcgaaccccggacaacttgattaaaagtcaagtgctctaccaactgagctaatatcccatatttttcttttgaatgcccagttccggaatcgaaccagagacacgaggattttcagtcctctgctctaccaactgagctaactgggcaaatacgatattaaaatttgagttgcgggaataggatttgaacctatgaccttcgggttatgagcccgacgagcttccagactgctccatcccgcgataataattaatctcttgaaaagagaatgggcagaggtggattcgaaccaccgaagcaaattgcagcagatttacagtctgtcccctttggccactcgggaatctgcccatttaaaacgttcaatatgaaattgactcattttaattctcaaaataaattgagaaaagccgatgatcggactcgaaccgataacctgctgattacaaatcagctgctctgccaattgagccacatcggcgtatcaaatgggacctatagggctcgaacctatgaccctctgcttgtaaggcagatgctctcccagctgagctaagatcccatattgaacgacccaagcgggactcgaacccgcgacctccgccgtgacagggcggcgctctaaccaactgagccattaggccattgaagatgataccttcaaaacttcatacagaactccgtcaaccaactgtgaagttgcaaagcaacttccaatgcgaacatcgttcgctatttggtcaagccctcgatcgattagtaacagtcagctccacacgt

SEQ ID NO: 5167 - DNA, 59147 bp, Unknown
  gut microbiota DNA sequence
aaaactttctatacttaccgccgctgcaaaatacgatgttgcctgtacttccagcggtgtggaccgccgtggcaatggcaccggcatggggaactctctcgcctgcggaatctgtcactcattctctgcggatgggcgctgtatttctctgctcaagatcctctttaccaatgaatgtatttttaactgcgcctactgccagaacaactgtaactccgatgtaaaacgggcttcctttaccccggatgaagtctgtgagctgacgatagaattttaccggcgcaactatattgagggacttttcctaagttccggcatcatgatcagtcccaattacacgatggatctgatctatcagaccctctaccggctgcgcaatgtctaccatttcaacggctatatccatgtcaaagcgattcccggcgcagatcctgtccttgtggaaaaagccggttttcttgccgaccgtatgagtgtcaatttagaacttccgaccgccgacagcttaaagaaactggctccctataagtccagaactactattctaaaaccaatgcgccagatccagaaccgcattacggaaaataaggatgaacttgccatttaccgcaaagcaccgcgttttgtccccgccggtcagagcacacagatgatcattggtgccactccggaacacgattatgaaatcatgcgcgttgctgagacactttatcagaagtttgacttaaagagagttttttactcggcttttgtcaatgtaaaccacgactcaaacctgccggttctgccgggtggtccgcctcttttacgtgagcaccgcctctatcaggcagactggctgctacgctattatgattttaaagtggatgaattactgaccaaagaccgcccggatttcaatatctatctggatccaaaatgtgactgggcactccgtcacctggagtattttccggttgagatcaaccgcgccgattatcacacccttttgcgggttcccggcatcggtgcaaaatctgcctcccgcatcgtaaaggcaagacgtatgaataaactcgatttttccgatctgaaaaagatcggtgtcgtactaaaacgtgccctgtactttatcacctgttccggtcgcatgatgtatcccacaaaattagacgaggattatatctgccgcagcctgattgccgaccgtacccagattccacgcgaaatacgtgaggcaggatatcagcagctcagtttgttttcctgatgatgctgaatggagattagtgtgaaaaataagatttttcacatgcaggatttgtgcttacgcacaaacttgagatgcaaatgaaaacgttgttttcattgaaaaacagcgcaagaatggggattaatatgtacacatttatctgcgaagattctcccaacggaattttttccggcatttatgatgcgtgggattttaaagtaaatcaaaataaaaaatatccagccggcagcacagcgactgacacttcttcccgcatgtacccgcatgcctgctcgcacgaagatatccaccttgtctgccatgagccggacaattatcaactgttttatgagtatatccatgtggaaacttccacagaaaaatcagataaagtcgcccgtaccatccagtgcaggcttggcagtgaattttacgatgccattttaaatgcgatcctctccattgttcccgcgaaaaagaatgacttagacaaagccgacgctatttaccacactcttgtacttggtctgaatacagccgccggagcacgcgccatccatgatctctccaatccttatgtccaccgcctgtttacattgtcgcgcgctaccgcaaacgaagcgcatcacctgctcggctttcttcgtttttcggaactggaaaatggtgttttattctccacgatccatccaaaaaataatgccctgccgatattagcagagcacttcaccgatcgtctcccacaggagaattttatgatatatgatgagaaccggcagcttgccgcagtccatgccgccggcaagaacttcatgctggtggatgcctccggcatagatcaggaccttttaaaacgtacctccgaaaaagagtctgcgtatcggaaactgtggctggccttttttgaccagattgcgatccaggcacggatcaatccaaaacttcaggcacagaacattccgaagcgcttctggagtgatacaccggaacttgcaaaaaaataaagccctgttccaattgaacagagcatctctttactatcttatatatattataaccaaactattcttttttgtaaataatatccttattacgaaacagcctttccgcatttaccctcgtcgcctgttctacttcctccggcgtgatccctcttaattctgcgatctttttaatcacaaacgggatgtatgaagaatcgtttcgctccccgcggtgcggctccggcgccatatacggacagtccgtctcaagaaggatccgatcaagcgggatctcctgtacggtctcctttaactttttcgcatttttaaaagtcacaacaccgccgacaccgatataatatcccatttttataaattcctgtgccatctctttcgaataagaataacagtggatcactcccggtatctcctccgcatgtactgatttcatcacttccatagtatccgctgccgcatctctggaatggatgatgacaggaagtgacgcttctcttgccattttcatctgttccgcaaaccagtatctctgctgtttttgtacttccggttctttatcccagtaataatccagcccgatctctccgaccgcagctactttttcttttttggtctgctctttcagccatgcaaatgtttcctcattcaggccactgatatcgctcggatgtacaccgactgctgcatagacaaacggatacttctccgacagtgcaagcgttgttttggtagattcgattgaggcaccgacattgataatcgttcctacaccacgccctggcatagatgtgatcagcgcatccctgtcctcctcaaaccgttcatcatcatagtgtgcatgtgtttcaaatatcataattatatttctcctttatttacctgcatgagtaccgggatttttccaatgatctcaccgccaggtacactctgtccaccatatacagcctcgattaccggtgcaatcccttcaactgaaatcctgctttaaatatatacccttttacgccaagttccaatacttttacaatatattttagatctgtctttttaatttaaccggaaagtttcaatggcattttctaactgtttcatgctgtccatcatctttacgacttcggattttaaagcctctgaatcctccatctgctgtccaaggaagcgatttatttcctccgtggttcttacggtatgttcagaagaatccccgattgcacgtattttatctaacactgcatgtcttctaccgttcatctcatccacttttcccgatatctcatccagttcctgtatcatactctccatgacgctgctcatgtttccaaatgcctccatggtatatccggcactctctaccatttcattgactttgccgcttgtctccatgacacattccccggactgcaggacttcatttttcatttccgctacggtcatgatcagggatcacattcttgtaatggtatgaaataatgcctcgaaaagttttccaaactctccaccttttttccgtttctctttttcctgtaccgtaagatctccgtttgccacacaatcaagtcttccgatactttttctgatattgcgcgtaatgcctgccgtgatcacggttgcaataagcatggctgcaatgcatgccgcaacgatcatagcgatcgtgatatcccggatatctttcgttcctgcggtaatgtactcaatcggcaccatcacaacaatttttccacctgtcacggaactctctgcactcatataataataacgtctgccatccacttttacataactgctactttctgctgtatctatcagaccactgtcaaccggattatttacgctgatcatcctgccatctgcagtcatatctatggctgtaagcgctgatttttcatagttctgggtaagtccctcataagatttctgatacgaaacaacacctattatgataataaaaataatgggtactaaaaatcccgttattaactgcagtcggatcgagctgtgcggtacaacgatttttatctgatgcagttttatttttttcgacataaaaaaacctcccatctttttatctttatcataaaaggacgaaaggttttataaaatgtcttattttttaattgagtatcgtttttttattaaatggaaatattaatattctctaccggactctgtcctgctgcaggtgcagtttgcgccgaagcacctgtataagcagcggatgtgccctgcgacaatgtatcggtatcaccgctcattgtctgatctgtctctagctctgcatcctgctgcgcctgcatcttaatctgtgcctccgtcagctgtaaatttgtggattcggcagacagactcacgatcacaccggaatccggcgatatatcagacgtattgcggtttcccatctggtctttgatgtatttcatatccgcttcactgatcttgctttgctcctgacgtctgtgactgttgcgcttctgccgtatctcgatcctttttgccttttctttctgtacgttctggatctcttcgattgcaattttttcctttaactcgcgttctttatttgctgcacggcgcttgatctcacctttcttctgcgtcacctcagacttgttttcgcttttatattttctattttctatctcttcctgtttcaaatgacgcactttaagctgcgcacactctaccatccgtcttgcatgtgcaactgctgcagatatttccttgctgtcgtattctcccgttgcggcataccgctgcaaagtggcaagcctgctttttgccttcgtcagcgcatttgctgccccctgcggtttctttgcacgcaaaagctgattggaaacttccttatagttataattcagttttttctttgtgccgctgcttttgctctttccacagacgtactcaatacgcgcacgcgaatccttatttgcatttttaatagtcaatgttccagccattgccactgccaccgtggtgctcccggcactgttcaccgaaactcccataactcatattcctccctgacgtcatgacagggatcacataatattttttacccgctttgcgcgtgcctgtcatgaaaaatgaatccattcatatatctttaacatcggcaaaactgcacaaaataattaccttcaatttacatgatatgacacatccagagcgtttccgcaatgttaaccatacaaaacaatcccaatattactgcagacatatttaagaccagtaccggcacttcttttctgatctgcccgcgcatctgtctgatacagaaaagacagaccgccatcagaataaaatacaggtaaatatacggccggtccgccgatgcatagatcgtcggcgaaaaacccatgacaataccggatgcaagcccgacaccaagtatggcaatcgtatagaaatacgtttccagcttttctctcatcaggcaaaacagtgcataggacattcctgccaccgtcacgatcaaaaatatcaccgggaaccagttcgcaggatctttaaaattccattccgctgtctgctttggtatgataaatattttttcataccacggatgcccggtgcggatcagtgcatatccaaggatacaaaataccggaacagatgacagcagcgtttttatcaaattttttgttttcagtccgaccaatacggcaagcacggccgagacgatcaggaaaatactgttgacctgcgcaacaaaaatgcgttctatatttgcagcccccatatatattttttccaaaacggaaaagtatgcaaattccggcatacgtccttccacttcctgcatactgcgaatgccgtttcccgggcagcgcagaatcgtaaaaagcgagatcacatcaatgactgcatatccgtagatccacagacttccagacttctttctgcgccagctataaaccatggcaagaaacagcagcaccagcaaaattgcagcaacctgctcctgactgctgcaaaaaatgcaggaaaccacaccgcctgcaccttcataccagtgtacatgtcctttctgtgccagtttctgtaaaagcagggcaatgtataataacccaagaagcggccacagataattgaccgttgtcgcgatccagcctgctgacaccatatcagaaaatggataaagcagcataaatgcacagacaagccatttacctgccgttttatttatgttacattccatatccagatatttttccggattcaagaataataagcggtataataatacaggaatcaatgtaaaaacaataatatccagtatcttccacagccatggaacctgtaccaacgggataagtacaaattcgattgccattcttgaagaccatgtcgcatagcggtgtgctaagatttcccagatacttcttccatccatcagagtctgaaaatagacaacatcatcccccgcagaaattttaatgaccagatgccagatgagtgccgccacaaacaccaccacaaatggaatattttgcctgaataccttttgtattttttctttcactcttttgttccccgatgtactagcagatctcagctccgctcggcattgctttttccggtgtcatcagtgcaagattaccctctgcatcttctgcacataagagcattccctcagataaaactccggcaagttttgcaggttttaagttcacaagtaccattacttttttgccgaccatctcttccggtgtatagtatttgcggataccggaaacgatctgttttacctgacttccgatttttacctgggaacataataatttctttgacttcggcactgcttcacaggaaatgatctctccgacctggaactgcattttcataaaatcatcatattcgatctccggttttgcctcgatatcgattgcttcgcctgattcctctgtagtctccggcagctcgccaagcgccttctgctctgcctcaaactctgctttctgtgcttcacggatcgcatcgatctttggcatgatctcttttgcatccagacgtgcaaaaaggatctccggtttgtctgtcactttatttccattctcataaagtccgaatttgtccagattatcatattcacgcatacctgcattcagctgcgctaagatacggtctgctgtctccggtaagaagctctttaacagacatgctccgatcgtgatggactctaccagattataaagtacttctgccagccggtcttttgctgcctcgtcctttgcaagtacccacggtgcagtctcatcaatgtatttgttgcagcggcggaataagttaaatacctctgtgattgcatctgcaacacgcagatttttcatcttctctgcaactttatctctcgcagatgtcacaactgcctttaagtctgcatcaacttcctctgtcacacctgtgctctttaccacaccgtcaaaatatttattgctcatggaaatggtacggtttacaaggtttccaaggatattagcaaggtcagagttgtaacgctcgatgacaagatcccaggtaatgattccgtcattttcaaacggcatctcgtgtaatacaaagtaacgtgttgcatccacgccgaataaatcagccatatcatctgcgtagatcacgtttcctttagacttactcatcttctcgccgccctgtaaaagccacggatgaccaaacacctgttttggcagcggcagatccagtgccatcaaaaagatcggccagtagatcgtatggaaacggatgatgtcttttccgatcagatgtaagtctgcaggccagttcttgttgaacagatcactggaattgccgtctgcatcgtatccaatcttggtgatatagttggtcagagcgtccagccacacataaacgacatgtttcggatcgaaatctaccggaatgccccaggaaaatgatgttctggaaacgcacagatcctgtaatcccggaagtaagaagttgttcatcatctcattttttctggaaaccggctggataaattccggatgctcattgatgtagttgatgagtttgtcagcatatttgctcattttaaagaaatatgcctcctcttttgccggctggacctcacgtccgcagtccgggcattttccatccacaagctgtgactctgtccagaaagattcacacggagtacagtaaagtccctcgtaggaacctttgtagatgtcacctttatcgtataattttttgaagatcttttttacctgtttctcatggtcttcatcggttgtacggacaaaattatcataggaagtgttcatcagatcccagatgcgttttacctctccggctacattgtccacatactctttcggagtgatcccggccttctcggccttctcctggatcttctgaccatgttcgtccgttccggtctggaagtaaacatcataaccttcctgacggcggaatcttgcgatcgcatctgcaagtacgatctcgtaggtatttccaatgtgcggcttgccggatgtgtaggcaatcgctgttgtcatataaaattttcctttgctgctcatgtgtatttccttctttcttaatgatttgcttgttgatactgtgggttatttcatcttataaataaaaaaaatcccgtcctctaaaaagaagacgagatgttatcccgtggtaccactcccatttaccggcacaaaatgccagcctcatttcgatatctcacggactgcccggatacatactgtaccgatgctcatctgctgtaatatctcccgctgtaacaggcggacctgtcgggacttatctgtcaattttaaacagttcagtcctgccactccaaagccatcttccatctatatccgcccgtttcctctcagccttattccgattcggtatttcagtttctgtgatacaggttttcttattaaaatacctgactcacaacaccttttccggaaatatagaaacttctctgtaaagttccaacagatgtactctctttttcatggtgttttatttcttacgattattttcaatctagcatggaatgtgtaaaaagtcaagcggctgatccactctactttttttgcttgccattcgagaagcgatcactgcaaattaatatatttttctccattcctttcatcatcaaaatatgctacactaaaaacagtttagttcctgtctgtctgacaggagtatttgcgcagcatacgcagaaatggagagtttatgaaaacaaaatcttatgtaacaaccttattgaagtttgcactggcttttactttttcatttattctgcttattttggcaaatgtaaatgtcgaagcaaagactgcaactgtcacaaatttaaaagaaacagatattgagccctacgaaaatccagatattacccttacctgggatgcggtttcgtcaggtgaccagaccatctattatcgtcttgaaataagcgaggacaaaatcacctggaaggatgaaggttcctattacgaaccgactgcgaaaatacatgctccgtccggcaaatctgttttttatgcgcgtgtctgcgcctacacagctccttacgactatgcctatatggacgataaaaatctctgtgatattggaaactggtctgacaccttaaaagttgttgcacggatcagcgataaaacatcaaaaattacaggaaccaaagcaaccgctgcatccctgtcctttaaatgggcagccgtttccggtgcatccggatataaagttgtatattatccaagtggtctttccgatctttccaaggaacttaccacaagtacaaattcctgtacgattaaaaacttaaaagaagatggctcttatgcaatctgcgtttatgccttaaacagcaattctgactttacggctgtttctaatacttacacagaaacctacgccacaacacttccaaagaaaatacgtgattttaaagtgacaactgcttatcccggagatgccagctttgaatggaaaggcattaatggtgccaaagcatttcagttgcagataacaaaagtttctgattccaaaaaatttaaaaaaccgattgtaaacgaaacaaaattttacagttaccttggaacatataccaattcaaaaaaaatcaaagcaggcactttttattcagcaagagtccgttcctatgtcacacttgcaggcactaagcaaaaagtttacagtccatggagtaccgtcattacttttggcacctcgcctaaaaagattactgcaaaacagtccggctcaggaataaagatcaactggtcaaaagtttccggtgcttccgcatatgaaatatacgtttccacaagctacgatacgaaaacttttacaaaagtagacaccgttaaaagtaaaaacaccagctacaccctgaaaaaatttaaaaagaaaaagctgaaaaaaaataccatgtattacatcagtgtcaagccggtctgcaaagtcggaaagaaaaattgttccacaaccgtttatgtatccaatcctacatcagtattttatagcaaataaaaagctgatcataaaatgattgattgttaaaaataaaaccggatgtttaaaaaatgcaaatctcttatatacattttttaagcatccggttttatagtgaatatacacaaacttttttctaacacttgccgtttcaactttcccatgttactctacatttatcgcaattcaaatttcatttctgtgaaattcattttctgaatatcagtcttttatgtcccggcaattcgccagctatttcagaaaagtattgtgaaaaccattttatttttttataatcaaaggagaatatgatatggggaaaaacacacgaaaaatccatcatacaaaacgggtttttgtacaaaagaaataccgggatgcgttattccgtaaaattttcagtgagcgttctgtcctgcttgaattatataacgcgctgaacaacactggttactcagacgaaaaggaacttactgtttacaccattgatgatgtaatttatcttggctacaaaaatgatgtatctttcatcgttcgtggaacactaaatctgtatgagcatcagagtaccttaaatccaaatatgccgcttcgcgggttgatttattttggtaaacaatatgaaagttacatcaaacagcaaaactcccttgcctggaatgtaccgcaaaagtctataatattaattacggacacaataaagaactgatgcttcggtgcagaacgttagaggaatactctattttgatcagcagaatctattcaaagattttggaaggaatttctttagaacaggcaattgatttcacggtacaggattgtattcatgataatattctccgtgatttcctcataaaacacagatcggaggtagttggaatgttactggaagaatttgatatggaagagtatattaaaatggaacgcagggacagctatgaagatggaaaatgccaatatcgtatacacgtcattcacacgatgtaccaaaaaaatattcctgctgaaagctgcatcaacatgctggatgaggatgctgattttgtaaatcatatctaccagttatgccagcttcaccctgactggaacgacagcaacctttttgatgctgtagaaagcaattagacacatcatatcatgagtcgagtctcactttttgtattttataataacatgatgttggggcagaacagatcatttcaggtatctgttttgcccctccagtttaaaaatcaattcctatcatgtattttttggcacttactccacatttttcgttgcgatcacatccacacctgtccctgcaacatctttcacaagcacatccccgatgtgcaccggggcagcaacctcaatatttttcaatgctttgacacagtcaaatatttttcctttcggaatatcttcttttgtctttacagaaaccattgcttcgcttccgccggtgatccttactgtagaggtaacgatcctggtcggatttgtcacttcttttctcgcatagatatcaccgcgcttacaggtatttcccgtaatgcttacgacttccccatgttccatttttacagtcagcgggcagcccatcggacagccgatacagattaaattcttctcttccatgatatacctccatttttgcgctgcttttcaatgaaaacaacgttttcatttgcatctcaagtttgcgcgtaagcattttattcccgctcgattttcactgtgatcgtctttaaatccgggtactgcaaaagctgttcttttgtcagcttgatctcttccatctcccccggtgccacaaccggacgttttctgtgaatgactctctcatcatcaaaataagcgctgacgtaacagttcttgtatacaccgcccacacggaaacggactgtgatctgctcatccatattagcaacattgatggttcccggcaccgtataccggacaccctcgatcggatttaaaacaatgtcgttatctcttgctgccttcacgccatctgctttcacataagctgccgcattttttccggctgtctttgcttcctcggacacgaaatccaccagatcgtgcacatgcagcacatttccacaggcaaatacacccggaatatttgtctcaaggctctcattgaccttcggtccggaagtaaccgggttcatgtcgacacccatgcctttggaaatctcattttccgggatcagtcctaccgaaagcaacagcgtatcgcagctatattcttcttcggtccccggaatcggttttcctttactgtcaacctcagctaacgtgattccttctacacgctcttttcccttaatgtccacaaccgtgtggcttaactttaacgggattccgtaatcatccagacactgcacaatattacgtttcagaccgccggaatatggcattaattctgccacgaccttaacctttgcaccctcaagtgtcattcgtcttgccatgatcagtccgatatcaccggaacctaaaatgacgacttcacgtcccggcataaagccttcgatgtttaccagacgctgtgccgttcctgcggagtaaattcccgccgggcggtatcccggaatatttaacgcgcctctcggtctctcgcggcatcccatagcaagaatgactgcttttgcctggatctcaaacaggccatcctcacggttcatcgccgtaacgactttctcatggctgatatccatgaccatagtatttaatttatattcaatgcccagatcttttacctgtgaaataaatctgcccgcatactcaggtcctgtcagttcttccttaaatgtatgcagtccaaatccattgtggatacactggtttaaaattccgcctaattctttgtctctctctaaaattaatatgtcatcgattccgttattttttgcagaaacagcagccgcaagccctgccggtccacctccgataattacgatatcatatgttttcatgctctggctcctccttcttacagactgtccttgttggttccgacaataatctttgaatttccgcctgattttgtgatctcagactggttcacaccgcgctctctcgctaaaatttccatggttctcggtgaacagaaacccgcctggcagcgtcccattccggctctcgtccggcgtttgacaccatctaacgattttgcaccgagcggacgtctgatggcatcgatgatttctccctctgtgatcatctcacagcggcagataatgtttccatactccggtttttccttaattaatgccgctctttcctctttacttaatgtgtttggatttaatacacccttgcgtgttgcaatgaaatcttttttctcttccaaatgcattttctcttttaacagatctgcaaccatctctccgatcgcaggactgctcgtaagtcccggtgactcaattccggcgcagtcgataaatccttttgcatcggcaacctcttcaataataaactcatgaccatcctcatgtgcacgaagtccggcaaaagatgtgatgacctgacgcatcggaatattttttacattcaggtttgcaccggcaatcacctgatccaggccttctcttgtggtgttggttccctctttatcctcaatgtcaatggcggtaggccctaacagcaggttgccatgcaccgtcggcgaaatgaggattccttttccatatttgcccggcagcgcaaagaccgtatgacttacatggcttccggcactcttgtcaagcaggcagtaatcaccgcgtcttggcgtaatatggattttcttttcactgaccatgttgtgaaatttgtccgcatagacaccggctgcattgaccacatattttgtctcgaacacaccctgatttgtgtggacttcccagatatctcccgactttttcaaatcggttacttctgtgtcaaacttaaattccacaccatttacattcgcattctcagccaatgcgatattcaggttgaacggacacacgatcccggcgcttggcgcatacaatgctgcgcagatatcatcctcaagattcggctccatctcatgcacttcctctttggataaaatacgcagccccggcacaccgtttgccacgccacggtcatacagcgctttcagattcggcatatcctcctcgtccttgcagacaaccagagaacctatccgcttaaacggaaaatcaagatctttggaaagctgctccatcaaggcatttccccgtacatttaattttgccatcagggaaccttcttttgcatcatatcccgcatgtacgattgcactgtttgccttggatgtgccgcagcagacatcttcctctttctctatcacacatacttttgcattataacgcgacaattctctcgccgctgctgcgccggatacaccggctccgatgataattacgtcatacattttccatctctccttttttactttgttcttctggtatctaacccggagggctttttcattcataagatgtaatctcctatgaataaaaaagcctgacaagtaagcgcacccatgctgttgcgattatcctgtcaggctctcttctctcttgcccctcaacaatagattgcaggttccacatgcacatctactgtcataaatataaaattgtcatataaagttacttatcgcatgacaaacatacggtctaccatggaattgctccatatagcagtactgcaacaattgctccgatcaccggtcccaccagcggaacaactgcatatccccagttggatgttccttttcccttaatcggaagaacggcatgtgcaagacgcggtccgatatctcttgccggattgatcgcatatccggtcagtccaccaagtgacataccgatcgatacaatgattccaaatacaagaaactttccaagtccatcggtaagtcccggcacatttgccatacctttgatcgcaaatacaaggataaacgttccaactgcctcactgaaaatattctgtcccatgttcggaatagaaggcgctgtacagaacaccccaagttttgtcgcctgatcctctgttgcatcaaactgtcctttaaacaaaagatatacgatcaccgctccaacaaacgctcctgcaaactgtgcaatgatatatcccggaaccattgcccagtcaaaacttccgtcaactgcaagtgctaacgtcagcgccggattaaacgatgctcccgatgctgctccgaaaataaatgccggcagcataaccgcaagtccccatgcaaatgtgatctggacagttcctccacccttcatgccagatttgttgagatttacgtttgcaacaactccatcacctaagatgatcagaatcatagttcccaaaaattctgctatatatggtaacatactatccccccttattcaattaactttaccaatacattacaatctttaccttccctatacaaaaccttctttttaatcttcctttgcccagccgtatgcatatttgactgctttgttccagcctttgatcatttcttctctctttgcggcatcgatctgcggctcaaatgtcttgtcgattgcccagtttttaataacatcctctttacttgaccagtaaccgactgccagaccagcaagatatgcagcgcccatcgctgttgtctctacacattgcggacgatttaccggcgcatcaataatgttcgcctgtgtctgcatcaggaaatcattagcacttgctccaccgtcaactttcaaagcggtaagatcaattccggaatctgctttcatggcaaccagaacatcattcacctgatatgccagagattccaatgttgcacggataatgtgatatttattgacgccacgggtaatacctacgatcgtacctcttgcatactgatcccagtgaggtgcaccaagaccggtaaatgccggaactacataacagccgttcgtatcttttactttctttgccatgtattcagaatcaggtgcagaatcaatgactcttaattcatctcttaaccactggatcgcagcccccgccacgaaaatagagccttccagtgcgtaattaacttttccatccagtccccatgcaatcgtagttaccagaccattcttggaaaataccggtttttcgcctgtgttcattaaaaggaaacatccggttccatatgtattctttgcctctcctgcgttaaaacaggtctgaccaaacaatgctgactgctggtctccggcagcacctgcgatcgggatcggtccaccaaggtaagaaggatctgcctccccgtaaatacagcttgacggtttcggctccggcagcatacattttggaatatttaactctgctaaaatctcatcatcccactgaagagtgttgatattaaataacattgttctggatgcattggaataatcggtcacatgaacagcgccttttgtcagtttccagatcagccaggtttctaccgttccgaataataattcacccttttcggctctctctcttgcacccggtacattgtcaagcagccattttaccttcgtgcctgaaaaatatgcatcaatgacaagacctgttttttccctgaatttatcggtaagtcctttttcttttaaggtatcgcaatattctgaagttctgcggcactgccatacgatcgcatgatggatcggctctcctgtttccttatcccagacgatcgttgtctctctctggttggtaataccgattgctgcaatatcctctgctgtcgcattgatcatgttcatcgcctcaactgcaacaccgagcatacttgcccagatttcatctgcatcatgttccacccagcccggctgtgggaagtactgtgtaaattccctctgtgccacgctgcacatctcacctttctcgttgaacaggatacatctgttgcttgtggttccagcatccagtgccattacatattttgccatactttttcctcctctttcttttggctttatttaatatttaaactgctccccccagagcattataaatattcgtaaaattgattgttctttttttctattgaaatatattattttttaccttacatattccagactttatggtttgtggatgataccgccatcgcacccgctgacaatgctcccatcacgtcttctttatctgtgatcagccctcctgcaatgatgggtacttttaccgaatgactaatctgtgcaatgatcttaggcatcactcccggaagtacctcgataaaatccggttttatcatgtgctgctgttgtctgatattttcaaatgccattgaatccagtaagaaaacacggagtactgtatacatagacatttcttttgcttttttgatcagtgatggcttcgtggaaatgattccatccgcttcagtctgctccttaataaattcaactgcaatctcctttggacttaaaccactgatgagatccatatgcaccatcgcgatcttacctgcatcccgtatcgtctttacaattgagccaatagaacagacatccccgaataaaataaaaatgactctgatatcatcatgtttacagcattcctccacatcttccatactttttactgctgcaataattggattatcctcaactgcttcataaaaattctgattcatgctttccccttcccagatacctttttcctatttcatatgtatacaactgatgatcatctcatgacgtttttgcattgcagttttaatataacataaaaaagagcgacaataccaacggcttcatcggccgttctattcgctctcctgtcattgctctcttattgaactgtctgcattatatcataatgcacaatgcaatgcaatgctttcttgatgttatttattatttttgtttgtgttttacagctttttctatatattattgtatgtaatacacaattttatttcattttcttatatatctttgttatatttttatcaatgtatcatatttcgtttcattccatctgaaaatcatccaaagcagacttcttccctgtcattttcccccgtgtgtcaggatgccccgcccagactttctaacttttcctcacattcctgcgccgtgcgtgctcccatgcctaaatccataccaaagattccatattcgtctcctgctgaaagtccgacgatcttaatgtctccatctttattatcctgaaatagcaacgtaatacaggtagaattgcccggtatcacattgtatctctgatagattctgaccgtaacatccattccctgggacgtcatgctgtactcatcccggaaatctaatttatgctttccttctttcaacagcatatctgtattttggatcacattcttcaagttaccatgaactaccttctcaaatacagccatatgacacgcctcccccacaatgtttttccttcgcagctactatttaaaactgatttataacaattttacatcattgattttgtaacgtcaattacgccgccagcacttcaagcaccgcctccgccagctttttatgaccttcctcattcagatgttccctgtcctccttactcggctcagccacatcggatgctgcaaggaaatcacagccatatttttctgccactttctgataaactgctttcaaccccttcgatacctccacggacttttcattaaactcaggatcatacccctgctcccagacaccttccccaagctgtatcggagagatcagtaagatcctgatattcttatctgccttgcggatctgctccaccagacgctccacgccaagaccgatcacctctgcagaagcattgtaaaatgtcttgcagtcattcgttccaagcattaaaacaacgcggtccaccggcgcatggctctccaaaagagtcggcaaaaacgctgcaccttttctgccctcgcgcagctcatcctcaaaaactgtcgtcctgccgcacagtccttcctcaatgatgcggcagccttttccatataactgctgttcgatcagccctgtccatcttgtatctctgccgtagcggtttttcgttcccggtatcaatccataagtgttggaatctccaaagcataatatttctttcacactagtctccttttctccgccgttctgccgcggatccagtttttatattaaatatgtttcatctttatctttttatttcatactatattaatatgaatactatgttttgtcaacaaaaaatatggtaacagaaaaccctatccttaacagtgacagaaaaccctatccttaacaggatagggttacaaatccaatatttataaggcagatcaatgcaagcagtgtcaccgccagctttccgcctgtctgctttaatttttcttccacagcatctgccatacggtaaatgcaaaacattgtcacaaacagcaatataaaatacagggtaatataaacacgctcaccggaaacatagatcgtcgccataaatccaaggatcatgcctgcaccaaatccgcatcccaacataagaagcgcgtaaatatactctatcggctgctctcctaagatgatccataatgcataaagcatcgccgccactgtgactgcaagatacaccatcggaagccaggtagaaagcgtgccccagctccattctgtgatctcctgcggcatgacaaacagacctgataatcccggataagcagtacgcattgccgtctgcccgaataaaatcaagaccggtaacgcagaaataatggtctttttatagtcatccgtttttacatagacaagcattgcaagcaccaatgcaactgtcagaaatacggcatcgcagtttgctataaacacacgctcaatactgagcagaccaagatacagtttatctccaaatccatatgtctcaaaaattggaagatctgcaatgctgaccgcatttcttcccgcatttcccggacagaacaggattgagatcagtgttatgatattaacaagtaccattcctgccagatacagattattgctgtgtattacttttttgtccgtcagtgtgcttccagcagaatcctgcaccaaaggcatctttttagatttcccacaaatcagataaatgccatacaatataaaaaccacaaacaggatcaccgctacctgctcatgactgcttgcgatcacacagacaagtacccctgcaatgccttccacaatattgattttcttatgtaccagcatttttttcagcagaaatccaacaaagaacattccccagaccggccagaaataatttaccgttgtggtaatccagccggccgttcccatatcatgaaacggatataaaagaaccgccgctgccgcacaccagtccatcagttttccgccatcaaatatttttgagatcaataccggaaacgaaataaaaagcgccagatcaatgagtctccacaaaattggatactttatgatccagacaagaagaaactctatcacaaaccgggatgtccacgtctcataacgctgtatcagataattccacaatccaagctctgacgttgcctgcgaaaaaaacacatcatctcccgccatcggacggatcctcagatgataaataatccccacaaaagccacaatgaaaaatggctttaactgacgcagatctgcccggactttattctgattttccacgcatccggctcctattcctcaaatatatcgtccatttttgttccgcagctactgcagaatgctgctccctgtggcattttggcaccacatttcggacattccacggctccctgaagtttaaatacttctgcgcgcatgcgctcaatctctccaagcgcctccgtgatcaggaaaaagtgctcctgttccggtgtcttttcttcgccttctgcgctctcttcatccttgtgtttctcataatatgcttttccaagttccgcatactgtttttccacaaaatcttctttggatctgatatccatctttaactttgcgatcccggatacatccttcgctttctgaccaacatccttacctgcactcacgattgtctcgcttaacttatcaaaaaactccatactgtgctacctccctgaattggtttcctgattgtttctatactacgcagtacctgttttggcactgctcattgcttacgcacattatactcttttcctaatatatcttcaataaataaggtcttaactttatataaaatggggttaatcgctgctgattacacagtacgattgatatgagctgcccgttcaaatggtgtgtcgcaggcttatgagtggcatccctcgcaaagccggagtaatttttgttccgttgtacgaaaataaggcaatctaaatatgcctgatgtaggttttctcggagtgacgtgaccggcagaccaagattttctaattttctcccaaagtcaccaaaatctgccccggcttttgtcaatgaatgtttcgttaaaaaaatattaccttatgcagtccatactttttttaccagacaatctaataatatcagtatgattgcgcacaaaattatatatgtggaatttaatggtgttatacaaccgatgattaccattatacttgatataaataacactgcattatgtattttcctatgtcttgaacaatcaatctttttccatatatagcatgcaataagatatactataattaaaattatgattctatccattatttcactcctgaatacatatcttctttacgtctaatactggtatatttaattcctcattgtaacacctatgcaatctattttttatttcttcacatttcaatgtaggatttatgctttttgccaatgcaattgttcctgtaacatatgctactgaaatagacacaccttcggaataagtatatgtgtcctccggcattaaacaatatactttctccgccggagcatatatatcaattttttctccatatccagaaaactcatatattttaccatttatccccaaacctcctacacatatagcattgggtaactcaaaacaagctggatacacatgttgtacatctacattagaactatttttcccacctgagcaaacaaaaattgcatctgaacattctttcattattgtatataatttttcactatatacttccatatcccaactacaattaaaaagacgaattcccttattatatccatatttaattgcattaaccacatcatcaacttgattattagaaatttcttgatcgttatgatatattacactttgtaaatcagaagatgtaatatctataccactatctataattcccacaataatgttttcatttccatatgtttccttccaaacatcttctatatgtattttatttttccaatattcagtctgttcgcatcctgcagtctgtataaataatgaagcaaaaattatatttgcatcctttcgctggtgttccatctgctaatgcttgtttacttccttttgatgttttagcccatttaaacgatggtggtgttcctagcatattataatacgttatgctttttgaatttgtactataggcaaaacctccactccatgcaacaccaattgtgtctgtataactccaaggataataacactttagccaattaaatgattctgtaactttatatttagaattttttcgctttccatctttatatgttgattgattgaatactgtttgtgaaaaactgagttttgaagtagcaattgatgagagcgatttaattttttaaactgtcaaaacagaattatactcttttccctgtatttcttcaataaacacctttttcatcttatacattatctttcttatctcgtacagatatatatcagatatcctgcataacatgcaagcagcaccacaccttcttttttctctatatgaagcctgctccatgcaaacacccatacaagaatgcttaccaacaccagaagtatactgtccaccacattttccataataaacgctaccggacttatcgctgctgtcactcccagaataaacagaatattaaaaatatttgatccgatcacatttccaaatgccatatcaacttcattttttcttgcagctaccacagaggtgacaaattccggcaggctggttcccattgcaacgatcgtaagtccaatcagattctggcttaacccggcttttacggcaatcgctgacgcaccatctacaacaaaatccccgccaaatttaatagccactgcaccacccacaatatataatgcacatttccatgcaggataaattttatattcaccggaaggatcttctgcttctgccgatgccgcatgcgcttttaatgctgaccgtaccatccataccaaaaatccaataaaaagaagtaacaatatcacaccatctgttcttcctatctccatgccggaaattcccagaacaaacaaaagcaccgcacacagaacagaaactggtatttctttttttaatgtatctttctgtacgatcaacggtgcaaataatgcacatgccccgcatacaaacattaaattaaaaaggttagaacctatcacattgctgactgccaatgcattgttaccggcaacggaagctgttacactgacagcaagttccggcaggctcgtccccattgcaacgatcgtgagtccgacaatcatagacggaatccgcagcgcccttgcaacggaagaacttccctcaactaaaaaatctgcacctttgatcaataaaacaaatcccaccagtaataaaactattgactgcatcatcgccaccatacacatttcctccttcgtttttcctgttatttataaaatacccagatgtgtcaaaaggattctgacaccgagcaatactaagatcagtccgccggcaaactctgctttcttttcgtacttgtttccaaaaaagtttccgacataaacgccgccaatggaaataaaaaacgtagaaattccaatgatcgtgatagcctccacgatcgggtaatctaaaaatgcaaatgtgatcccaactgcaagtgcatcaatacttgttgcaactgcaagcacaaacatctcttttaaatcgagcggtgcatccatttcttttacttcgtcatcttccttatccggtttcacagattccacaatcatttttccaccaataattccaagtaatataaatgcgatccagtgatcgatgcttgtgatatacttttcaaactgacttcctaaaagccatccgacaaatggcatcaatgcctgaaatcctccgaaaaataacccgatcacaagtgcctgttttttgttgacctttcgcatcccgagtcctttgcagatcgacactgcaaatgcatccatggacagcccgactcccatcagaaacaattcaataaaaatcgccatcttttttcaccgctttctttttgtatcagacattttccgtgatatttccgcagttattttgtactgtatgcgccatttctgcagtgatttccaatttccctcatgtttttactgataatatttatctgttaaatatgtcaaaaaaagagactccacgtatattcctgtaccggatatcctcgcagatatccctacaaaaatatacatgagtctcattctttaagatttgccaggttcttttcgtgtgtgcccaccaaaagaaaccggtatgttgacaaaccacgcgatcacgcgaactactccctcacggtttcacagactgcttcccttacaaaccagcctgtgcttatcataagtttttcacttatgccaaacgctgttttcacatcatatcttatgcaccatgatttgtcaatcaatgttttaataaaaatacattaccttatgcagcccatgcttttttaatcagccaagcaattcaagaatctcttcttttgtgaagcttgcagaatccattccttcgccctcgagcacctgctcggcaagtttctttttccgctcctggatatcgatgatcttctcctcgatcgttccctctgccacaagtttgtataccgtcacgacatgcttctgtccgatacggtgcgcacggtctgtcgcctggttctgcacggcaacattccaccacggatcgtagtggatgacgatgtccgcggaggtaaggtttaatccggttccacccgcctttaagctgatacagaataccggaacatcatcgttattaaaactttccaccatctgcatacgtttttccttatttacagaaccggtcagaagatagtagtcgattccttcttttttcaggcgctctgtcagacggtctaacatggatgtaaactgcgagaacagaaggatcttgtgtcctgctccgactgcgtttacgatcaattccatacacatgtcggtctttgcggattctccatggtaatcttccagtaaaagtcccggatcacagcagagctgacgcagtttggtaagttcggaaaggatctgcatcctgcctttatggaactctttctcattctgctggctaagcatttccttcatcctggtcgcataagcatcatataactgcatctgttcgccatcgagtcttgcgaatacattttcttcgatcttctccggaaggtcttttaacacatcccctttcagacgtcttaaaataaacggacggatcatgcgctgtaaacgctccatcttgtttgcatcctgattcacagcgatcggaagctcgatctcctcccggaacttctgataggtatacaaaaatcccggcatcagataatcaaaaatactccagagctcactgagtctgttttcgatcggtgttccggtcaatgccagcttgaatgccgcagtgatctttttgacaccttttgccgcctgtgtggacgggttcttgatatactgtgcctcatcgatgacctgaatcgcaaatacaaacttctggtacacttcggcatcacgttttaacagatcatacgaagtaataaggatttctccctctttgctgtgacggatgatcgacgcacgatccggtacacttccggcaacaatgactgtttttaactgtggtgcaaagcgtgtgatctctttctgccagttgtagaccagagatgccggacacacgatcagggaacggcgcagttccttttccccagcctgcatttcttgctgttctgccgttaaaaggctgatgacctgaagcgtctttccaagtcccatatcatcggctaaaataccgccgaatccattctcacgcagcgtctttaaccacaggaatccattcttctggtaacttctcataatagaattcagcgcttccggcacttcatagtcactgtcctcgatcgtcttcatgttgcggaccatgcccttgaactctttatttttctcgatcgagagaagctgattgttctttaatgccgcgtccagatacattgcgcggtattttggtacaattaaagtgccttttttgagatttgtctccgtcaggcgcagatcctcgctgacttccgccaacgtacttaaaccgtcctcttcaatatttaaaaagtcgccgtttttcaaacggatatacttctttttcctgtcatattttgagagcaggtaggcaagttcctcccgtgacatctcatcggaatgaatttttaattccagaagatcactttttaacgagatacccacggaaacggccggggaagataccacctttaaattgcggaaattttccgttgtataaatggtcataaattcacccagtcttctcaatccacctgaaactaactgatacaacatctcctcattgttcttcagcacaaagactgtctgggacagcgcatattcattgaaatacggttccacaagatttttgatgcggagttcctctgcgagatcgcgcacttcacccggtgcgatcttctcgaggacattatatttatcatccccgtaagctgccatcagttttgcacctaccgtattcatatcctgtctgtctaaataaagttcaaactcaggtttcggcggcacataaaggctctcatcaaatcctgcctctttttccactttaaaatattttttcagtaatggaagcaggtcgcggcagaacatggcaagctcatctgcagcgatataagtctgtcctccggtctggcggtgcagaaattcaaaaaattctccgaccgtttctttcattcctgccggactgcggtagatcatatccgcgtcatagaaataaaaatatttttcaccgatgatcacagaatcatcttccagcatcagaaagataccggaaccgccctgacggataaccagcttcggacgcttttcttccggtgaaaatgtataggtatcctccggtaaaaatcctacctctgcctcaaacggcatatccccgactgcctcaaaaaaacggtcgatccccacactgtctaactccatcgtgcgttcataactgcccgtatacgcataatatgcatggaactggctctgacgtcttttatccatctcctgctgttccataaatgcaatcatacgttttgcagattccgtaaatgcatccagatgatgataaaactccagttttttaccgtaacggactttttcattgattttaatcgagtgtaaaaatgcagaaatatttttgagtacatatttctgctccattccaatcttaaattccaccgtggcataactgtattccatcttgaaataaggctctaactccaccttgccgtaaatattttccggtaaaagataggtggaacctgcacgcatggaataacggtttaacagattttttaatgaagtatccgtttttaactctttttccgtgcggatgttcttctgctctgtcttctcgcttactccaagttttgcatttaagatatctttcgcctgtctgcggttcacataggcaagcgcaacggcaacacagtgcttgcagatgccctcatagttgcaaaacgcctcacagttgcagcggctctctgaaacttccgcatattcttcatctatcacaagccggacatcgtagtgatcctcgactgttccttttactcttccaattaattctgcctttggaacgccatcttccgtgtatacgtcataggaaaattcctgcacgagtccacgctcatacaattcctttccccggcggtatgctgccggatatgcttcctgcttaatgtctgatatggaaaacatgattgctgtgctcctcaatagtatattttttgcatctttctattgtaacataaatttgaggattcggttagacttttttcactaaaatacaatcttgatctccgtacccacaccaacctcacttgtcagcgtcatctgcgcatcatgctgcgcgacaatatgctttacaatggcaagtcccagacctgtgccgccagtggattttgaccggctcttatcgacacggtagaaacgctcaaagacgcgttcctgctgttctttcgggattccgataccggtatcttttacgatcaggaccggtctggtattttcgatcgtagtcacgatcgtgacactgccgccttttttattataacggaccgcattactgcaaaggttaaaaagcagttcctcaagcagcgtcttgtttccgttcattggaacagacgccccctctaagtgcagcgtcacctcatttttatctgcctgcatctgcatggaatgaatgcactgctccccaagatcatgcagatcaaccgtctcaaattcaagttttaaatcactgtcatctaattctgaaagctttataatatcgttaatcagtgactgcagacgctccgcactcttatggatctcatttgcaaaatgcgcggtatcctccccgcccgtcattccgcttgcgatcagttccgcatatccggagatcgcagtcaacggcgtctttaattcatgggaaacgttggccgtaaactcctgacgcatctgcgcatgatttaaaatatccatatgctgctttttgatcatggaaataaacgggcgcatttcctcgtaaacttccgtttcatccaccaggataatattgtccgccattttttcgatcggcgccatgagtcttcgcgtcagacggtaagagtaaaatacacacatcagaaataccatcagaccaaccgctaagatcagacctgacatcgtagacaccagatgataaatacttccactctctttcgcaacacgcacaacgctcccatcttcttttctaagtgcataataaaaggtatgctttgacgacgtagctgagacacggattgattttccctcgccattttttatggcctccgcaatttccgggcgttccttatggttctccatggaagaagcatcttccatactgtcgtacaggacagtaccatccacatccacacaggtaatacgcagtccgtcattttccagtgaatatgtgatatccttcgaaagttcattcggactgatcaccgagacaacatgtgcacttgcctttaaatcatcaaatatctgttcctccagaatctgataaaaaagaaacatagaacaaacggcagtcaccacaatggcgattgccgcaatcaacataaaaccggtattaattctttttttcattcgatcatgtaccccacattccgcacggtcttgatgcagcctcctgctgctccaagtttctgccgcagtgttttgatatgcatatcaacggtacggctctctccttcgtactcaaatccccatacctgatccataatcttgtctcttgataaaacgattccctgattgagcatcaggtactttaacaattcaaattctttaaatgtcagctcacacagctgccctgcaaccgtaacggcatgtttgtccatatccataaggatatcttcatgtatcagctgtgaatcttcattcatgcggcttgttcttcgaagcagtgctttcacacgggagatcagctccatgactccaaacggctttgtgatataatcatctgctccaagatcaagtccctttaccttatcaagctcacttgtctttgccgttaccataatgaccgggacatccgcggtcgccttgtctgcccggatccttgttaaaatatccagtccgtcttcccccggaagcatgatatctaaaaggatcagggatgggatatttttttccagacgcttaaaaaatgatgcgctgccctcaaattcttccacttcataaccgctgtttttgagcgcataacgttcaatttcacgaatattaatatcgtcctccactatatagatcgttgccatatttttcctcaatccccatttttgcgcccttaaatctgatatatcttctcgaactcgtttaactgttttgtaaactctgcgctctcctctgcatccagctgctcggtaaaactgtgttcctctaactgggtatcctctaactgcatcatatataccgcgatattcgaacaatggtctgcaacacgctcatagttcattgcaagatctgacaatacaagaccaagctcaatggtacatttcccttttctaagacgcttcatatggtttttctttactgtcttgtttaactcatcaatgacttcttctaacggttctaccgtacgcgcaagtgcctcatcaccatccacaaatgcgtttgtggtacgctctaagatatcacggagtgctgtgctgtataccttcatttcttcctttgctttcttggaaaatacagcgccctctttatacatctgctgtgcattttccaccacgttgatggaatggtcggaaattcgctcaaaatctgtcaggcagtgaagcagtgatgttaccttcagactgtctttgtaagataaattctggctgcttaacttggttaagtatgcactgagtttgtcatcataggtatccacgatgttttcttttgcaatgacatcctcgatcttttcttcggagtactcatccagtacggtcattgcctctaaaaatccttcgtgtgtgatcttcgccatctggtttgccagagagtgacactgctcaatggcaaatgcagggctgcttaagaagcggtcgtctaagatcacaaatacatcctctttctgattctgctcctctgctgttttcgggatcgtcaagtaagccagcttctctaatccctttgtaaacggcagtaaaacaagagtcgcgaacacattaaatatggtatggatcattgcgattcccgctgctccaacgacctcattggtaaactcaaatccgatcagcgcattgcctgtataaaacaataccaaaaacaaaatcgtaccgattacattgaaataaagatgcacgaatgccgttctctttgcacctctgtttgccccgattgctgaaatcattgccgtcacacaggtaccgatattctgtcccatgatgattgggatcacagagccataggtaaatgctcctgttacagacagtgcctgtaaaattccgaccgatgcagaggaactctgtatgatcgcagtaagtacagctcctgccaatacaccaaggaacggattgtggaacatcgttaagatattcgtaaattccggcacatctgcaagcggttctaccgccccgctcatgctctccataccgtacattaatactgcaaatccaagtaagatctcaccgatatcttttttcttgtcgctctttttcgacatacaaagtatgataccgatcattgcaaggatcggtgagaaggaggatggttttaacatctggataaaaaagttatccccctgcagtccacttaagctcaaaagccatgacgttaccgttgttccgatatttgcacccataatgatgccgactgcctgtgacagcttcataataccggagttcacaaaaccaaccaccataaccgtcgtcgccgatgacgactggatcactgcggttacacctgcaccaagcaacactgccttgatcgggtttgatgtcagagtctctaatatcttctctaatttacctcctgacatcttctccagtccggcacccattacattcattccgtacaggaacagtgccaatccgccaatgagggtcagtactccaaaaatatccatctcaatctccttttgtatgccgcttttcttattctttacgtttttttgacatataatttatttatacagcatttttcgtcattttgcaattagcataaaaaggagtatgtaaattcgccgtcaactttatgtaaaatctatgtaaaatctcaaagaaaccatttatttttgtctatttttaattttcatgctgtccggtaatggaatagatcacccactccgcaatattggtcgcatggtctccgatacgctcaaaatattttgcaaccatcagcatatccgttgcctgctccccattttttacattctcattgatctttttgatgagctgctgtttgaactggttgaacagatcatccaccacatcatcttctttgatgacccagtgtgccatatccatgtctttctgcacgaatgcatccacactcttgatgaccatgtcagttgtttcttttgccatttccttgatcaggtcaagattgatcggatccccggtttcataagcggcgtccgccatcagtatcgtcatttccgaaatatcggatgcatgatccccgatacgctccatatccgtgatcattttcagtgctgctgagatcaggcggagatcttttgccaccggctgctgctgcaataataatttcatgcagaggctttcaatatcgcgctcctgatggtcgatctcctcatcaaagctgatcgctttctgcgctttctccacatcctgtctgaccagtgccgaacatgccatctcgatcgcctgctcgatcaggcttcccatctcaatcaattcatcgttcaatacctgaagctgtctgtcaaatctgtttctcatgattttccacttccctctttcttttcctgttatagattgctctacatttctacacttttttctgtatgtcatggctgacccagcccgcagtatcatccaaaacgtccggtgatgtaatcctctgtccgcttatcctgcggcacggagaataaccgctctgtctcacccgactcgatcacttcccctaacaggaaaaatacggtcttatccgagacacggactgcctgctgcatattatgtgttaccataataatcgtgtactgttttttcagttcaatgacaagatcctcgatctttgatgttgagatcgggtcaagtgctgaggtcggctcatccattaagatgacttccgggttaacagcaagtgcccttgcgatacaaagtctctgctgctgtccaccggacatgccgagcgcactttttttcagacgatcctttacctcatcccagatcgccgcatcccgcagggatttctccacgatctcatccaactttgccttggagcggataccgtgtgttcttggtccatatgcgatattgtcatagatactcattggaaacggattcggtttctggaataccattccgacacgttttcttaaaatgttgacatccatgccgttgtaaatatcctctccatccaaaagaacactgccggtgatcttacatccctcgaccagatcgttcattctgtttaaactcttcaaaaaggtggattttccgcagccgctcggtccgataaatgctgtaatctcgttcgatgcgatcgacatattgatattttttagtgcatgaaaatcaccataatataaatccaggtttgaaattttaaatttttctgccattttttttctccattctactgtttcggcgcttcaaatttttttgcgatcagggaggataccccgttgatgatcagtaccacgataagaagtacaaccgccgtcgcatatgcctcattggtatgcataccctcacgcgataacgaatacatgtggatcgctaaggtacggccggaatcaaaaaatcctgcaaggtttgcaactgtacctgatgtataaatgagtgccgccgtctctccgacgattcgcccgatcgctaagataatgccggataaaatacccgggatcgcactcggaagcacaattttaaatatggtacgcagttttcctgcgccgagtccgaaactcccctcacggaatgaatccggtacgcaaagaagtgcttcctccgtcgttctcatgatgaccgggagtaccatgattgcaagcgtcgctgcacctgccatcattgagtagccccattttaatgctgtcacgaaaaacaacataccaaagagtccataaataatagaaggaataccggaaagtgtctccgccgtcacacggatgatcccgactaacttgtttcccttttttgcgtattccacgaggtagatcgctgcgcccacaccaaacggtacggataacaaaagcgccagcaccgtcataaaaagtgtattgatcattgccggaagcatcgacacgttatccgaattataagtccatgcaaacagcgatggttttaaatatgggataccgcggattaaaatatagcccaccagaaataccaggacacccacggtcagcactgctgcgacaagtactaaaagcagcaataagaatgagcccggatgtttcgtatatgatttgatcttatttttcacactactttcccctttctaattatcctttgtacgtctttttaaaatagagaaagagacattgatgatgaggataaacacaaacagtaccacaccggttgcgatcagtgcttctctgtgaagatccgttgcgtatcccatttccattacaatatttgccgttaaggtacggacacctttaaaaatactcgatggaacccgcgcctggtttccggctaccatcataactgccatcgtctcaccgattgcacgtccgacaccgagcacgactgctgccatgataccggattttgctgccggaacgatcacggtaaaaacacttctctcatgggttgctccaagtgcaagtgccccctcgtaatagctgttttccaccgcacggatcgcagactctgacacaccgataatggtcggcaggatcatgattccaagcaggatcgaagcggttaagatactgtttccatttcctttaaaatgttctctgataaacggcaccaatacgaccagaccgaaaaatccatatacaatagaagggatgcctgctaagagatccacgatcggttttaaaatgcggtacagtttttccggacagaagcgggccataaagattgacatcagtattccaaccgggactccgattaaaagtgctcctccggttacataaatacttcctaagatcatcggaaagattccgaatatattattggtcggtttccatacttttcccgacaaaaactgccatacaccgattttctgcattgccggaaatccgtttgcaaacaagaacacacagattaaggctaccgcgataatggatatgactgccgtaaagaggaaaacaccttccattactttttctttgatatgattcattatttttctccagactgataaaaagttatgtacgttatttatgtaaagaccggcagagtaactgtctctcccggtctttacctgatgttttataataaggaattctatgaaatatgttgtttgtatctgtctgtattactctgtaacgccatcccaggatgtgatttcgcctgtgtagatgcctttgactgtatctttggaaagatctgtagtcgggttgtcgttgtttacgatgactgcgataccatccattgcgatcacggttgctgttaagccgccctccgtctcagaatcttttaattcacgggaagccataccgatatcacaggttccatccatagctgctgtcatacctgtggtggaatcgctctcctggatctcgatctctgcaccgctgttgactgcgacatatgcctcttttaatttttccataacaggtgttacggaagaagatcctgctacaacaacttttccgcttgcgccgtttgactcgaatgctgctgcaccgtcatctaccgggatgtatttattatcagaaataactgcctgtccgtctgcactcataataaagttgataaaatcctgtgccacatcgcttggtgttcctttggttgcaatattaaatggtcttgcgatcgtgtaatccccgctcttgatattatctacggtagcttctgctccatcaatggaaactgcttttacactgtcgtttaaggaaccaagtgatacatatccgatggagtattcatcacctgaaactgttgttaacataacgtcagtactgtttgtgatgattgcttcatcggttgtattatcaattttatcaccggcttcatttttctcttccacaccgaacagctcgatgaatgctcctcttgtaccggaaccatcctcacgggatacaacgttgatgtactcgctgttgtcaaaatctccggttgctgctgatgctgaatttgcagctgtcgtatctggtgtaacatctgctgactgatctgctgaactgtccgctgcatctgcacttgcatctgtatttgtatctgctccggcatttgcacttgcatttccactgttgccacagcctgcgatcatgctggctgccatcatacctgttaataacatacacattactttctttttcattttcttaatcctctcttttttcaatttgcagggcgtccatcctgctgttttcttttcattttcttttgacagtttttactttacggcacttatgtaaaatacatgagagaggtttggtaaaatgtatgtaaaataatggtaaacgtttcgcttactttttctcgatctgtctgcgcagttccaacatctgattgtctacttttgcgatcacatcggaataatctttggttgcacgctccacattttcaatctgtccggcatttttcttataacacatctgattatcaagctctgcccaatagtccatggcaaaagaacggatctgtatctccacccttatttcctttgtcttttccagataagtgaccggaacacccacgatcagatggatactctggtaaccgctctttttgggatttttcacataatccttttctttgagcagcgtgatgtccttctgcttttttacataatctgccacacggtaaatatcatcacaaaaaaaacagacgacgcggatcccggcaatatcgtttaaagtatctaccgcagcctgaaacgttacttccctgccctttcgcatcagctttttggcaatactgtccgtctgtttgatccgtcccgtcatagtacgaataacctgacggtcaaattgctccgtcaggtccgcattgatcatttttaattttgcctgcaccacatccatcgcatatgcgtaagaaagtcttaccataggtgcttcgatctgttcttttaattgtttttccatgagcaaggtatctgctcccgctaaagtctcttttattcctatgcgttttttctgatttttagaatctttcttcggcaaaatccatatctcctggttcgtaatcgttttcatatccatagtcatagtcatcataatcattttccgtttccgcttcgaactcatccctggttctgcttaccgccaaagaccgcttttcccttctctgcattgtctgtgactggatcttaaaaataacaaacccgatcacaaacattgacgcgatcacgataacacccgcttttgaagtgtggtcattccctgctataaagatcaaaaccggaattttaatccgctccagattctttttcctcatcagcgtttcctctaacgtgggtatctgtgcatgttcatactccggatgtgtacggttaaaattatgtttgatcagcttcgcgtaggtataatcttttacccagccgcttccatcactcactcggtcgatcgtttcatcgtggatgacaacaagttctccgtcttttgtgagctgcacatccagttcaattccatctgcgccaagctctaccgctttctcaaaagctgccattgtattttccggtgcataaccgcttgtaccgcggtgtccccacacgagtgttctttccatctctgctccattcctgccggtttcttccatctgcgcactaaatccgcctgcccggcatcgattcttttatttctctcatctttaccctatatcctaagcggatattgtaaaatgggtgtgggggattatgtaaaaaatgggtaaaaaaatacagaaccacgtttttgtgattctgtaatataccttataatgttgttggcacaaatagtgcgttcaggtttattgattgacaaattgcgcaaagccgtgcctgttttgttccgttgtccgaaaataagaaaagctaagcctgcctgttttactttttctcggagtgacgtgaacggcgttcaacgagccatccttggctcgagaagccttgttctgccatccgtggcagaacatcactgtggatagacaggcagactaagattttctaattttctcccaaagtcacaaaagcattctcggctttgcgcaatttgtcagccgccaggttgtgaagcactatttggttttaacatcatatattttgatgccggaattcctttaatccttatgcgccgcctcataaacgttatagcaggctgccgctccgatcacaagcactgcgccaatgactgccgtgcgcccgattgtctcaccgcagaagatcgcaactaaaattggatttaagatcggctctaatgtagaagttaaggatgccgtgaccggcgaaacacgatccaagcccctcgataaaaagatgtaggataatccaaactggatcacaccgagaaggataatgcagatccatgccttcgcagaatgatcggtctctcccataaacgacggcaaaccgatacataaactcataacatgggatgctaaaagtgatgactcaaaatcagaaccagggaaacctttcatcatcataaccaatgcataggtaaatcctgaaaatacagcaagcagatttcctgccattccgccggcacttaaggaatctaaaaagaaacacaatatccctgcgaacacgaccgcgcacgcgatcactgccgcctttttcggtttcttcttatataatatccacatcagcaggatcacaaagatcggctctgtaaactggagcacgatcgcatttgccgccgttgtcatctttgtcgcagagacaaacgtcagtgccataactgtattgcagacagcaccaaacagtaccgtcttattccatacaaattttcgttttgtgaccaccatataagaggcgatcagcataaatgaaaaaatactgcggattccctggatcgtgatggaactccacggaatcgactttatcagaacacctccggtgctgaaacatactgcagagagcagcacatagatggttcccttcatactttctttatctaattgtttttcctgcattttattctccctcccattttaccgcattcccagcgcaagcagcacaagtaccgcgagaaaaatgatatttgccagatgaaaccacaacagataataccccttcgtgcggttataattatgcgcatatattttataggagatcaggctcgccatggaggcgatcagtgtgccaagtccccctaaatttacaccaagcaaaagctgctttaaatcacccgaaaaaccggacaataacagtgccgccggaacattgctgatcacctggcttgtggcaattcccacaagaagttcccttccgttaaccagtgaatgcagtacttcctgaaacgccggcagccgtccgatatttcctgtaaaaatgaagaaagcgataaacgtaaagatcaggcagtaatccacctgccccagtacttttctatctgataaaaacacagacacagccaccgccgcaagcaaaatataatacggcaggatccttgccacgaccaaaagcgccataaggaataaaaccgcatacatgccggtcagttttttgttcattttctttttttcttccgaaaaatgacagtctgtcaacctgatttttctttttcttgcacttaaaacaaaaatggtcagcgcaagtaatacgccggaaacaaccgtatacggaagcatcaagacaagaaactccccagcattcatttctgagagattatataaatacaaattctgcggatttccaatcggagtcagcatacttccaaggttcgccgctatggtctgaagcacgatgaccggcaccataaggcgctcctgcccgcatttttgcagcgtgagaagtgcaaacggaacaaacgtcaaaagcgcaacatcattggtaatgaccatgcttgaaaagaaacacagaaaaacaagaacaaatgccagctgcgccgtatttttcgtatgcgcaagaagccgccgcccgatcccatcaaagattccattattctgcacgcccgccataatgatcatcagcgagagcaggatcccaagcacacgaaaatcaatataatcgatatatgcctgatccggatgcacaaaaaaagctgacattaccgctaaaatggctgcaacgacaagcaccgtttcttttttaacaaatactatcattttctctttcatatgtatgacaccacccataaaacctacctgtctattctaatcactttccccccggatgtaaactaaaaaaatgcgcatgattcgtctgcttctgtacacactataaaataacagctacatagcaatttacactcacatttgctatgcagagtaaaacttttatagaaagaatggagcatatgatgtacaccccagttacacttccggttacaaatgaatacggttattttgaaatacggttagagagcatcggcggtctcggcgcaaatctctgcggaaaaatgctcggcgaactcggtgccttatacctttccttaaactccttaaatttttccagctacggatctgaaaaacgaggttcaccggtaaaatcctatatccgctggagtcccgcttcccatccactgcgcatcaacagcccggtattacaaccgcatgtacttggcatttttcacgaagggctgatcgggacttacccagtattagacgggatttccgccgacacaaaaattgttttaaatacacctttatcctgtgatgaagcggcagaaaaatacaatatttccactggaacgctgtattgtctggacgcactctccatcgccatggaatccagatcccgcattaacatggttatgctcggtgcgattgccagagcgtgtccttttatcccgatggattccattgaaacactctgcaaaaatactattgggaaaaaatatccggcactgatcggggcaaatctgcagggtttaaaaatggggtatgaaaaaacagctgaaaaaaagattcctgacagaactgcttccccttctctcgcaaaagaaacttatatctggggctacaaaaacgccccgatcggcgggatcaatacacgccccggcagcacggtatcaaatgacctctccccctcccgcgaaggttatattcctctctttttgcaggatcggtgcatcaactgcggactctgtgattctacctgtccggatatggtatttcagtttgcaccaggaacttataaggggaaagaggcaatggtcaaccagggacttgattacagacactgcaaaggctgtctccgctgcgtggatgtctgtccgactcacgctctggtaaaagcagaagaaaaagattacccggacaagccgcattccatgccggatcaggatctgctgccagactctgtccggtaccagaagaccggcgcaaattcctggatcaccagtgattcttatcttgatgaaaaacgtattgacggaggtatcgtataatgtcagatcagcaacaatcaacaacacaggcttttccatcatcggatcagcagcaatcatcaacacaggctttcgtaaagaaaaccgctgcccagcgcaaactttacgaaagtggaaatgagcttgccgcctacgctgcaaagcagatcaattatcatatcatgggatattatccgatcaccccctccacacagattgcggaaaatctcgatctttcgggtgcaagaggcgagcacaacatccggctgatcgccgccgagggagaacacagtgccgccggtatctgttacggtgcttcggcgggcggcggacgcgtatttaatgccaccagcgccaacggtctgctctatgccttagagcaatttccggttcagtccggcacacgcatgccgatggtcatgaatgtcgcctgccgtaccgtctccggccctctgtgcatcaaaggtgatcacagcgatatcatgtatcttttaaataccggctggatcattctgtttgcggatgacccgcagatggtctacgacttcaatctgattgccttaaaacttgccgaaaaagtgaatctcccggttgtcgttgcctttgacggtttctttaccagccatcagaaacaaaaatgcatggtcttttctgaagatgaaaccgtacagcactttatcgggaaaaaactctcctgtgacaatcccgaaatctccgcttttgccggaaatgactccaccggggagaatcgtttttacagtgtactcgacctgaatcacccggtctctgtcggctcctatatgaatgaaccggatatcatcaacaacaaatatcagctttttctcgccatggaagaaacacgaaaaaaacttcccatactgtttgatgaattcgcctccctctccggaagaatgcacactttttgccgcggatatttgtgtaaagatgcagatattatcctttttctgctcggttcctcttttcacacagccacagttgcagcagatacgctgcgcaaagagggcatccgcgctggcgtcgtcacattaaatgtgcttcgtccatttccatctgacgaattacgccatctctgtatgcatgcaaagacgatcgttgctgcagaccgtcaggacagctacggcgccggcggcggaaatatgtccttagaactgcgcgccgccctgcaggatatcacggattccacacacccgatccgggtactgacccgcatttacggacttggcgggaaggatttttttgtggaggatgctgttgcgctgtttcgtgagggactttcgcctgatgccagggcttttgattactatggaatcacaccgggtacgacagaaaattgcccgcagccacagtattatgcacccctcaccaaagatcgccagtcgcccggtgtcacaacctgcactttcgatcctgcaaccggaaaaatgcttgtaaaaggtggattgatcaaagacgccaccgccatgcccaagcggatcgccccgggaatcggaacctgtcccggctgcggtataccggtcaacttaaatctgctgttaaaagggatcgaaggaaatgtggtctttctgttccagaccggctgcggcatggtgacaaccactgcctacccaaaaacggcattccgcatcccatatatccacaacctgtttcaaaatggagctgctactttaagcggtctggtggaagtatttgaggaacggcaaaaacgcggggaatatcccaaaggcgagatcacatttatcatggcaagtggtgacggcggcatggatatcggcatgggttctgcactcggaacggcactgcgcggacatcatctgctcttatttgaatatgacaacggcggatatatgaacaccggttaccagctttcctactctaccccgatgggtgcgaaaagctccacctcccacctcggaaaaacacagtacggaaagacctttttccacaaagacatgccccagatcatggccgcgacccacctcccctatgtggcaaccgtcgccgagtcgaacccacatgattttatcaaaaaggctgcaaaagcagctgcctatgcaagggaattcggcaccgcctatgtaaaagcgctctccgcctgcccgctcaactggaatgaccgtccggacacagaacgaaaagtcattgctgccgccgtagactgctgttattttccgctctatgaaatcgaacgcggcatcacatcactgagctatgatccaaaaaaatcgcataaaaaaatccccgtcacggaatggttttccatgatggggcgcacgaaacatcttgccaccgaagaatataaatcggttgcagaccagattcaggcagaagtcgacagacgctatgaacgtctggcagcatgtgccgaacatccgctattgtaatttttacgtcaatgatttgaccaccgacacaattcctgcgattacaagcagtatcagtgcaatataaaccagtcctgaaacaaataacccgatcaaaaacaacgggaagataatgatcgtaagtaaaacttttaagatcccccaggatgccttgaaagcaagcaggatcaattttccaaatacggcaaacattaaaataataaacaatgctgttaacatagtcttttctccttatcatgcagatttttcatacagtgattaattctatgttaacagttgtctgtctaatgtcaagtacctgctttaacctctgcgaaaccatgctttcatcacatcaaaaatctgaaccagttcctcttcctctataatgtaaggaaccatggaatacatgtactttaagaacggacggcaaaagactcctctctcatatgcaaactgctggaatccctcaagggctgctccatcgtgcacttccacacaggtacagccgcccataatacgcacttctttgatcctcggatccgtaaatccgtccatctcacggtgtgagatttcttcgatgcgtttgatcttccccatataatcttcccgctcgaaaatttcgattcctttgagtgccacggcacaggcaagtgcatttcccataaaggtcggtccgtgcatcagtgcatgacggtcattatcgctgtaaaatgcatcaaataccttgtggtttgccactgtcaccgcatgaccgatataacctccggtcagtgcctttccgagcactaagatatccggcagtaccagatctgccacaaaacggttgccggttcttccaaatcccgttgcaacctcatcaaagatcaaaagtacatcatacgcatcacacaattcgcgtgcgcgtttcaggaaagaaatatcatacatccgcattccgcctgcgccctgcagcagcggttccacgataaaacagttcaattcgtcatgatatttctcaaatgcctcctccagtgccgcgatttcggtcggtatatggaccacacccgttttttcttcaaatgcgaaatgataatcctcatcatcccccacttccatcgccttaaacgtatccccgtggtaagcatgctctaatgcaagcacaagcggacgttttctgccctgatttgtattgtactgtaatgccatctttaaggagacttccaccgcaacacttccggaatccgagaaaaagcagtaatccaaatctcccggtaaatactcctgcaacttatccgaaagcttctgcaccggctcatgtgtcagtccgccaagcatgacatggcagaaatgatctgcctgttctttgatggcagccgtcagttccgggtgtttatagccatggatcatacaccaccaggacgataccgaatcgatcagtttctgatctttcgtataaagataaacaccctcggcatctaaaattttataaggttcccgcattgttttcatctgttcgtaaggataccagatcatatttttactcctcttttattctgttctcaactacttaacagtctgctgccagatagctgcaaaatttcatacatatcaactttactcatataatcccgcaagtgcttccacatccatcttaagctccgtgtccccgtcctgtaccttcgcaagtgtcggcagtccggtcatatattcgcacataaagatgttatcgtcctccatcacatcccccggatgataatggttgaatatgattccctttaacgacaaatgatgtgccttcatatactctgccgtcagcacaacactgttgatcgtgccaagcccggcatctgcgatcaggatactggaaagtccaagctccgacaccacatcttcaagctggatctttgcctcatcaaaacagatcgggcacaaaataccgccgctgccctccacggtcacataatcatatttatcacatactgcccggtagccatctctgaccacagccatctccaccggatgtccctcgatccgtgaagcaagatgcggtgaatatgcatgttcatatacataaggacacatttcctcaagcggctgtgtaatccccgatattttctgcacaaacagggcatctccggggatcagtgagccatctgccctgcggtcatttccactcattgccgctttataatatgccgctgactttccctcttctgccagcttttttacgatcagcccggtcacataagtttttccgatatccgtcccggtacccgtgataaataaagctttgctcatatccatcctcttttctgtattctttccttccacataacaaggacatttcttttccatatgacgattcttactatgcctctgacttttcttctttccagtactccggtgtcacatcacggcctaaatcttctaacagccgtctgtcgctgcggatcgttgcgcatgccaccgtcgtcagcatatttccggtaatggatgcggatgctcctgcctggaatgcactctccccatcgtttgtcaaaagtgctcttcccgcagcaagacggatattggcatccgggttgatataacggaaaaatgcgatcgtgcgcaaaatatcagcctccgacagtcttggcagatgttctaacggtgttcccggaatcggcatcagcgcattgatcggaatcgagtcgattccaagctctgcaagactgaccgccatatccagtctgtcctcccacgtttctcccatgccgatgattccgccggagcaggcgcacattccctctgcctttacttttttcaatgtttcgatcttcatatcataggtatgtgttgtgcagatatttggaaaattacgtctggatgtctctatgttgtgatgataactggtgacacctgcctcgtgcagtctgtgcagctgttctgcagaaagaaatcccatggaggcacacagatcgatcttacactcttttttcatcgtctcatatgcatggatcgccttgtcaaattcctctcccgtcagtgctcttcccgctgtaacgatagaaaaacgatcaacgccttcccgctcattcattttgcatgctgccagaatatcttcctccggaaggaaatcatactcctcacagtttgtatgatggtgtgccgactgtgcacagtatttacagtcctccgggcatcttccgctgcgcccgttgataattgaacacagatctactttatccccgatccgtgcttccctgatcttatctgctccctcacagagctcctcaagatcacaggtcaggaaaaatgaaaggtcatcttcccttgtgattcttcttccgttaataatttcttccgctaatgtaagtgcattcatttctttttctcccgcttatctttcggatactgcgcataatcccaacgcagatccatgtatttgtatctcatgaaccatatctgctgcaacatctttaagatcttgcccgcactgcctcataagcaagcaccggtctgacacgctttgccaccactgccccaagaatacttaaggcaatgtcccccggcaccgctaaaacaaagcagtacaaaaacagtggtcctgccgcaatcggcgtattaatcacaaaattacagatgatatagtaataaatcataccgactgcatagacacaaaacagtcctgccagatttgccagaaggtaccgtgcaatggtctttttttccatatgttccgcaatccatccagtcacaaatgtacccactgcaaatccgatgatatatccaaaactgggtttaaacacataccacagtccgccgccctccgaaaaaattggaagaccagccagcccaagcagcatgtacgaaagtacagacaccgttcccagtcttgaaccaagcagcagacctgccagcatcgtaaacaggtactgcagggtaaatggcacgaccggtatcggaattttgataaatgccccgactgcaatcagtgcagtaaataatccacagtaaattacgcccttcgttttcatttttgttaacctccgctcatcttatagttaacaatattactcaaaaaagagtgtaatgtcaactttttatttccatcaagttaacattgcactctgttcaacaatcaaatcactctgttgtttccaacatgagaatgcacattcttccgttataaatgaaaatcatctatatctccatcatcctttacctgtcatatccggcatctgccgcacactttcttatcaccttcggaatattcgcctggttataggaaagtaccttgatctttactcccattgcatattcctcttccccttcaagtttctgctcgccgccttttatcacaactttaggccgtttcacatcaaaactgtattccattcctgtcagaaccccggatttattaatggtatacgcaatctgctcattctgatagcctgttttctggtactgttcataatagacggacattttatccatctgttccgtatcgtcctgctcctccataccagccggttctatgaggtcaagcgcctgatccctcttttccttcaactgctgccctgacagtgagaagataatctgcgtcgctccgtcatctaaatctaaacattccgcagaaacaacgtcctcctcacggtagccaggattcgtaagtgcctgataatttggaatgtccgtcgtcgtactgtagccattccattggctccagactcctgcctggtaagaattgaccgtaaccccatcacaaaattcctttaaaaacgtcatggcaccatcggcatccgtattcttatactccgctgcccaggtttcatctaacaggtcagcccagatctcctgcgtctgctgcacaatgtcctgactcccggaataactgttcgttaccagataatgcacattattcactctgcgcagtccccgcatgccttctaagacttttcctgtctcctcgcttgcgactccgcctgcaaacatgctctccaaaaataataccccggaaaaaatagtgactgcaactgcccgaactgattttttatccatagggctcctccgatctctcatcacgatcccattcgtggtttttcctgcaccatttcatggtatcatcattttccatcaaatacaatcgtttatcagtccaaggcgctcaaacgcatgcaaaattccatcctcatcaatatggtctgtcaccatgtctgccagccgctttacttcttccctggcatttcccatcgcaacactgatcccggcatactccatcatctgaaggtcgttcggcccatcaccgatcgcgatacagttttcccgcgaaatgccgacatgattcagataccgctccatgcctgtcgccttgttaatgccattgatcccgatctcgcccgcaaaatcacccattccgtccagactgatcgccactgcatcaaaatatggttccatgtccgcatgaacctttgcgaccggaaacggtgcgccgtaataaatgatcttctcatttttttcgtttttccatggttcctcggtcaggtgcatccgtccgatcaggcggtctaagcgctctttactcattccggcatcccggtaaacctttaacatgccgtcgcagcttctctggttcaacaccacaccgtcatccgcctggtaacagaataaaaatccattgctctctaaataatcaaaactgctttttctgtgttcctcatcaatatatgcatgataaaactcttttccctcgtcctccacaaaggctccggctccgccgacgatcccggaaaatccaagttctaacagtgcgtcatagatctgaaaacggctgcgtccgctgcataccaccatccggtggccgtttgcctgcgccgtacggactgcgtactgtgcggactccgggatctcgcctttttcgttgaccattgttccgtctacatcaagaaatactacctttttatccattctaccactctgccagtctatagattattacggtttgcactttaaatttccttttcgctggctgatcctttctaatcatatccgatttccgattattttatattatcatgcattttacaggctttcaatcattacacgaaaaggcacccgaaaaaccgctcctacaatccgatttccgggtgcactttcctttttaccactgttccctttttactgccggatatccaccagcccctgcgctaaatcctgctccgtaaatgtataactgctgccggaagtaccggtattcagataaagatacggcagtgcatcttcatccacaacaaaccccacatgcaatatctttgtctccccggctttgatgctgccaaaataattatttcccctctctccgccggtcacatcgtaatatgccatctcttcaccatactctaaactgctgctgtccgcctggactgtatcccatgcatccccttcttttggctgttccccgccgcagatctcgtaaacttcgttttcttcccttatcttcatgaccgaactaaagaataaaacatccgtcaattctgtttccccggcattggtatactctaatgtaacgtataccagtttccgtggtacctccctgctgcttatgacctcatcgagcgtattgatgccgtctccggctttgatgtaagaaatcgtatccggaagaagttttccattttcatccacgtccagcatatcacgatccataaaaaccggatcaaggattgcgacatcatccgtcactttcacatctgtcactttgatccgcagattctgtgattctccatcagcttctcccgtcacagcaaattcctcgccgatcttatgcagatttttcatctcctccgcagtggctgtcgtctttaacgcctcatcctcaccgctattctccgccatagcatcctcataatcgctccagttatatggacttatcaccgtgccatccgcaagttcctccgacggtgctaaaataatgccctctgcaaccttgcaggcctcctcttttgtcacatcatgaccgacatacatctgcatgacataatgatattccggataagttacatagatcatctggtcaaatgcagagtcatcacccacaatattctgcattttttcatagacaccatcgtggtttccaacctgtatattttcactttccgtcacataatgatcctgcatccaaaatgcctcatcaccggtatccatctgataaaatacaatcgagatacctccctgctccggtgtctgttcatagctgtattttccttcttccgtctctgtcattccatccggcagataagataatttcattgcaagctgcggtgccggatctattttttctgtattttctgtcgcatccgttttttcaattttagtcgtcataccgtaattaccctgcggactgctgctcatgcgatataattttgtacccgcaaaaatcgtcgttccaagtacaaacgttgccgccagtgacgccactaccgcttttttcagggaaaaataacctctctgcggtgtcacttttacctgtttttccacttctttttctatcatgtcccgcatgctctgtggcattttcggaaattcctgttccatattttcaatattcatactcaactctccattccgtaactgttttcctgttccaattcgtttttcagtttcgccctcgcacgcgacagacggttctttacggcgctctctgtcacacctaagatccccgctatctcccgcacactgtacccctccatgtaatacagtgtgacagaaagcctcgcatcctctgacagacggctgatcgcctcatataattccgaataatcttttgtctctgccgcacgctcctccatctgataatcctcaagcgacaccactttcttctctttcctcatcacggtataacattcattgatgagaatccttgtcagccatgtcttcgcatagacatccgattttaatgtatgcagtttggaaaatgctttcacgatcgtttcctggatcgcatctgcgcagtccgcatcacagtacagaagcgtttttgccacatgatacatcatatcctcggatgcgatgatcagctctcccaattcttcttttttcataactttcctttccgccggcttaaatatcctgtatattctgttgtttcttctgagctcatagaaggcatgtcattgcatatcccatgtcgttttttacctctgagtatacaatgttttcatgctctttgcatgattccgtggcaacattctgaccactgaacctttacatagattagacgcatgaaaaagataaaaggtcgcagtctttaaaaaaatattttcttgacaaatccgacgcaccgcgtctataatggcgttaattgaagcagaacaacagctttgacgggaagaagtaaaaataagcggaacggacagaaagcaaccggtcgatgagaggtgcacggaaaacttatttcgaatacatccccgagcttcacaccaaattcgtatttctaaggatgcgatagtaggctgtgacgtagcggcgcacgttacaagcgcctgagtgttgtcggacactcgatgaggcagacaatgtgaattgcctgcgaacaaaggtggtatcacgagttttatcctcgtcctttttgggacggggattttttaatgcaattttattttcaggaggatttataattatgacattatacgatgaattagttgccagaggcctgatcgcccaggtaactgacgaagcagagatcaaagatctgatcaacaacggaaaagctactttttacattggttttgacccgaccgcagacagccttcatgtaggacacttcatggcactatgcttaatgaaacgtctccagatggcaggcaacaaaccaatcgccttaatcggcggcggaactgccatgatcggggatccatccggccgtaccgacatgcgccagatgatgacaccggagacgatccagcacaactgtgactgcttcaagaaacagatgagccgtttcatcgatttttccgatggaaaagcacttatggtaaacaacgcagactggctgatggacttaaattacattgacgtactgcgtgaagtcggcgctcatttctccgttaaccgtatgctgaccgcagaatgctacaaacagcgtatggaaaaagggttaagtttcttagagtttaactacatgatcatgcagagctacgacttctacaccttataccagaaatacggctgtaacatggagttcggcggtgatgaccagtggagcaacatgttaggcggtaccgagctgatccgtagaaaactcggaaaagacgcttacgcgatgaccatcaaccttcttttaaattccgaaggcaaaaaaatgggtaaaacacagtccggtgctgtatggcttgatccgaacaagacttccccattcgacttcttccaatactggagaaacgtctctgatgcggacgtattaaaatgcatccgtatgctgactttccttccattagaggagatcgacgcaatggaaagctgggaaggcgcacagttaaaccaggcaaaagagattcttgctttcgagctgaccaaactggttcacggcgaggaagaagcaaacaaagcaaaagaagcatcccacgctttattcgcaggcggtggcgactctgcccacatgccgaccttagagctgactgctgctgactttgcagacggcgatttagatatccttgctctcttagtaaaagctgagcttgctccatcccgctccgacgcaagacgtgccgtacagcagggcggtgtctccgttgctgacgaaaaagtaacagacatccagaccacttacggagctgacgctttcggtgctgacggacttgtcgtaaaacgtggtaaaaagaaatttgtaaagattgttttaaaataattttttactcatcccggagtgcgatcagccacctctttgccaaaggaagccagctcccgcactccttctggatccccgtaccatcccgcatggcagtaagtctgctgcaggtgctgaggccgtgttttcctaccggatacatatggaactcaaccgggatctcatattttttcattgcaccgatcaaaagcagcgagttctgcaccggaaccgactggtctgtataggtatgccagataaatgccggcggtgtgtgctctgtgacctgtttttccagtgaaagcaattctaacagttcctccgtctcatttccgccaagaagctgtttaaaagatccccggtgtgcatattctccggaagtaataaccgggtaatttaaaagcattgctgcaggttttaatatatcgtttgttacacccgccatctctgccagccactttgtatgccagaacatcgcaaggcatgctgcaaggtgtccgcctgcagaagatccctgcaccacgatcttatctgtgtccacataccactccttcgcatgttcatgaatcagcttcatggacgccgctgcctctaacagggccgtcggataaactgccggtgccaccgaatagcgcagcactgccacatgatagccaatactcagaaaatgcatggcgagcggctctgcttcccggtcagacgtgtgctcgtaaccgcctcccggacagatgagcatcatcggacgtttctcaatcgcaatcgaatcagaatcatcgagtatataggtacaaagtcttgcatccgcaagagatcctttttcgtgtaaataaaaaacttcagtcagcatttttttctccatctgtatccattacatttccaacttgcacatatctttatcaacaaccagatatttgctcatcgttcatttgatatgtataaaacaaaaacctcgaaaataaatattttcgaggtttttaaaggcacggaccggattcgaaccggtgatgacggtgttgcagaccggagccttaccgcttggctaccgcgccatattcatctgcctgtcgcagaagttctgtaacgattttaacaaaacagttcctctgcgtcaagacagattttaaattttttcatcttcctacttaaaacttatgctttttttcacacaatattcctgtgttctgtcataagacgtgattgtttctgtactgacaatataaaacatatctccaacatagattccccggtacgcagaagtgtctgcaccttttgatgcatcctgctttccggcctgatcggtcagattctgcgacagcaatgtttcaaatttttctccattccatgaaagtaaaagatatgcggcactctcctcatccccataggactgcagtgcaaatccaagcagattttcctccgcatctgcaagcacacatttataattatagagtgcctcactgtaattataatcttttaatacgagactgttcatctcttttaaactggaagaatctgaaatgtcaaacattgtaatcttgatacctgtatgttcccctgttttttcatccgtctcatatccgatcccgaccagtttatcttctccccagaaatgcagatactctgaaaatccactgatctttaattcaccgagtaccttgggatttttgtcatccgacaaatccactgcaaagagcggatctgtattgcgataagtaacaaaataagccatattccccagataacgcgccgcatagatttcttctccctgcgcaagaccttcaatttttccggtaagattcagattttcatcaaacagatacagattattttctgcttctccactcaccgcattctgaccggacgttaacactcttaattttccctcgcattcattgaccgcaaatgtatctgtaactcttccattcgcagaaactgctccaacggcattcatttttccatcagaaagatcaaactttgcaatctgtgttactacatcatcccaatatccttttctctgatacagataaaaggcactttcactcacataaatatccacatactggctcaaaatcatggtgttatccacaatctgatccggttttttcacatccacagaggataccagcagactgttactcccaccatctccgatataaatatcttctgccgccactgccgtatcatttaccaatgggatccatccccctgcattctcatccgtgactgcttcttcttttgtctgttccggcaggcttacccttttgttcgtaaaaagataaatcatgttccctgtttttcttgatgtctggtaacttccatcctgtttcacacaacctttttttacaggcttttccggattactgatatcataggtaagaacttgtgtctgtgttccctcactaaaataataaaagcagtcttccgtataattttctgtatcatctgcctgcatttccagtccggaatcttcactttccacgatcacgcttaaaatatcaccatccacatacatctcaagcacacggtcggatgaagtttcagaaatctgtatttttccgatctgttttaatgcttttttccggatatccgtaatcaatatttcattgtggcttaccgtgtaaatataagaaccatctgttttgacaaaatcgctctcatccacgccttctttctgcagatttgtcccggaataccgctgttttgccgtatctgatgatatatctgccgctgtctgtccctcctgtgctcctgcgccctttatcatctgtgtaccaccgatttcttccactccgtctacagccgcatccacggtatctgatgtgtcatccataatatatgtcgctgcatcaccagagttagaactatctccctccgcaaccgctattccatctgcttccttttcctgaccactgccagagcaaattgcatcatagacctctccataattttttgcgactgtatacaaagatcctgcatcttttttttgtgcatttttctctacgcctgcagtcgctccatcttttaattcgctgctgccttctgatccttcatctgacttttgcccggatgccgctttttctatacccaccggcgccgtcataagccctgtgccgcccccggtaaccgcatggattcctcctgctgcgccaatgacaagcacaagtgccgccgctgctacagccccgtaataagtgatcccgcttctccgttttaccttgtttttctggttctcctttaattttcttttgatctgctccggttcaatactctctggaattttttcctgtgcggcagatttttctattttatctaaaatttctttttctgacataggcacctccattctgtaatgaaaaatccctttttcactacctcattaactactgatagcaatttattgtaaccactcacccattttttttaatgcccggctttccttcgagcgcacggtattttcattcatatgtaatattgcagcgatctcacggcttgtatagcctgcgaactggtgcatactgatgatcagccgctcctcatccgccagttcaaaaaacagcttcctcacctggatacattctgtcatctccgatccggtatcaagcgcgagttcctctatatcttccatcccggtctcatttttacccgcgtattcacgcagtttatccttgcatttattggataaaatccgaaatatccagctcttaaatgcctcttcactgcgcagtttccggatcgatgcaaacgcatccgtaacagcatcgcttaccgcatcttccgcatcgctcgtatttcggagtgtgtacaatgcaaatcgatacatatccttatatattccggcatataattcggcaaatgcatccacatctccgcgttttgcccgccgcacaagcttcatatcatttttcataaaatcctcatttctgagcaacttgttgtgaagatacgatgagaatctcaaattttcatctgcaatcaaagctatttgtttttgctcagaaacaaatagccgtgcgaaaaataagctatcaagcttatttttcgcactactttctccatgggatcctggtttcatgacagttatttgggatatccattttttctgtcatatatatagtccgtaaaagtgcctattctgttgcagaaaaaccccgaaaatttggcttaacagtgataaggaagtaattctaatttttactgttggctgacagattcgggtgtgcagggcaaccgtaaggttgcaaaagctgtctgtttccaacagaaacagacagcttttgatttgcgttgaaagcatctcgctgttttctctcgagcggggcggtcttcccacggaccgccccgcgaagccgttacggctcgatgatgttgaaggggttggctccggtgatcgggaactggttcatattctccatcatcagcgtcagcagctctgcgctgccctcgaccttgacgacctgtgtaaccgtttcct

SEQ ID NO: 5168 - DNA, 781 bp, Unknown
  gut microbiota DNA sequence
gaggcacagcttactatttcctgcaaagaaggcggagaggttctgctgggatttatttcactaatgcctgacaatacctacatggggcatggactcagaacagatcttgtagaaaagcttaagggaatgagtccaaagtttatgcgttttcccggaggctgtattgtggaaggaacgacaccgtccacagcgatgagatttcgggatacggtaggtccggcatgggaaagaccaagtaagctgtttgtatggcattacagaagtacattaggacttggctttcatgaatatctgcagctttgcgaggatctggggatggagcccctgtatgtatgtaactgcggaatgacctgtcagggaagaaagagtgtccttctggaaggagaggctcttgatgaaatggtacaggatacactggatgccattgaatatgctatcggctctaaggaaagcaaatggggaaggcttcgtgcttctatggggcatccggaaccctttaaaatgacctatctggaaattggtaatgaaaactggggtccggattatgaaaagcgatacaacatgatttataagaaggtaaaggaactgtatccccagattaaaaccatagccaatgagcatgtagagaaaaatggttgtcctgccgagtgcgtggatgaacatttttacaatacaacagagttctttgcagaacgtgtaaattattatgatgactacgatcgtaagggaccaaaaatctttgtaggagaggtggctgtaaacgaaggcaactatatgggac

SEQ ID NO: 5169 - DNA, 6310 bp, Unknown
  gut microbiota DNA sequence
ccggccagtctccatacctctgattacagcacagttcacctccctcatcatatgcagccttccaaataccaactcttctctcaaaatcatggtttacgctgattcgcattgttgcagtgtgccacagattccccttataatcctccattgtcgagccatgaccagcccctggcataaatccacctggatgataggaatatggattgttttttgccggtgtgaatggtcctaatggcttgtctgagacatatactccatctccgtatgtattatactgtgtacctgcaaaggcatactgcagataatatctgccgtcatgtttatccatccaggcaccctcaatataaggtttatctgtgaacattcccctgatcatcgggatatacatttgcgggatctgctccacaggtgtcccctgggatttcatgaaattgtcaaaacaggcgtccacctcttcctttgagcgtggcagcttaccgttatcatcaccaatccgctcatatccatatttataaggatcggcatatatcagttcttttttctctccctttggattcatggtctgtgggtctaactccactccccacataggggtctcatttgaacagccccagtaaaaataaacctttccatcatcatccacaaacagattcggatcccagaaatcaaaggttccctctatcttctcatatggtccgtttaagatatcttttgtgcggtacctgtcgcatttttcccctttttttgaggcacagaaatatacatattcccccatcacacgcacatccggcgcataatcatacaacggaagttctgatggcagtttatgattttcccattttaccagatcatccgaaacccatacaccaagagtcatggatgcaaatatgtaatatctgcctttaaacgttatcatggatgggtctgctgcttcgcggcagacagcaattccgtttttcctctgatccgcattgaactgatatctgtaatttatatttaccggattacaataatacttcatttattttcactccatatattttccaagttatagttgtcccagaaaatagagactctttttcggcatacgcttcatggtggatctgtctactgctatcagtccgaatttcattgaaaagcccttttgccactcaaaattgtccagcagcgaccagtggcaatagcctatcaccggtatatgatccgcaatacatgcttccactccctttgctgcctcatcaataaatgcaacccttctggtatcgtcctctgttgctatgccattctctgtgaccatgatcggcatatttttcttcccagcttttgtatactcctcatgcactcttctgatcacatgttccaatgcctgtggataaaattcatactccatctgtgtaatctctgccccctcaggcacaggacatattccatctggtccaataaggcttctggtataattctgaagtccaaaaaaatcatcatcctttatatagggaagataatgtgtaaattcctcctcccactcatgctttgcagctgcatctccaccatcaacagcctgaatatcatgaagtgacaatgacaatcctatcaaaagttctggatgaacctttttcatcgcatctcttgcagcctgatgcgcacgcattacaaggatatctccttctggtgttcttgcactgacaaagatctgcggtttttttgttccaaaaacttttttgttttcaaatccctgccagaacatatttttcagcattttattaaaattcatgccaacctgagcggtgccttccatgttcttatcttttttactcttttttccttccctgcgcttcgccatcatctgacgcttataacgctctgcgatcgcagctacctgaagtcccatatttgcttcattgattgtgatgacataatgcatgaggtctccaagtttttctgccagatatgcacagtatcttacaaaatactttacggttgactcactttcccatccgcctttttgtatcagccatactggtgatgtaaaatgcatcatggtaacaaccggttctattccatgattcctgcagcatttgagcacctttctgtagtgctctgtttctgcttcatcaaattttccctcttccggctctatacgtgcccactctatggaaaaccgataagtattcagcccagcctctgccatcagacggatatcctcctcataacggttataatggtcaactgcgtttaaagatggctcattaaagttcgtatgctttaagtgctccattgcccagtaatcactgtttgtattgctgccctctacctggtgcgccgcagttgacgcaccaatcataaatttgtctggaaatctgctcatttcatctgacctcacttcactgctctctctcaattaactaccataattttccatttaaagaaccttatttctttggaatctttccaagtgctgctgcaagcatcttcgcctgctctccatctgcatcgattcctccctgtgccagaagtttctttaacggctgtcttgcaatcagagccatcattgtctctggtatctttacattcttacccatacctccagccactgaaccctgcatctgcttcatcatctgcgcaagaagtgccgctcccgccggtacagcctgaatctctgccatcgtgctgtttaacgagagatatccgccttcttccttttcagactcttcctgtggttcttcaaaccagttacaaacctttgtggcatccataaaatacgccggatttggttcactgaccttttggatcgtcatttcatcgcttaatgcctcatgatctgtacagacagcttttatcgtatgctctccacagattggaacctcaaatttaaatatatgctcaccttcctgctccccaaagagttttccatccacatagagggctatccttttctggttagagtaaaccttaatctctgtgaccgtttctatacggtctgcatatcttcttccgcaaagatgaacgaacggttcatcgctccaccatgccttgtaaatatagtaagcatcctttttctcttttctgtcaaaggtgataagtcccttgtgatttttaccagggtcgcccgcctcatctcgtcctgcagcagcaaattcaaacatattccatacataggtgccccacaggtatggtctttgggaaatcatctcaagcatatgctcatggtacactgccatatagctttctgtataatcacctttttgcggctttggtgactgcaatttaattaccgaatcagcaccatactctgtcagtccgatcactgtatccggatgttctttgtggaactggtcaaaaaatgcatcattgtcttccatctcccccacataccatccatagtagagattatagcctctgatatccgggagacttacaagcggactgtctgtctcaagcataaacagatttgccattgcagatacgcggctctgatccattctgtgaatcatatcgtttaatattctatgattttctaacagatcctccgttaccccctgtaaagatatttcatttgagatagcccagcaaataatagacgcatgattatagttctggacaatcagttctttcatctgtgagatcgtgttttctcttccaccatccatatgtactgtgatatacggtatctcagcccatgccacaattcctttttcatcgcacagatcataaaaatactggtcatgctgataatgtgcaagccggattgaattagctcccactgacaatatcagctccatatcttcctcatgcatctcttttgtaagtgcatttccaacgcccatcctgtcctgatggcgtgatactcccctgagcggatagctctctccattcaggaaaaatcctttttcagggtcaaagtaatagctccggcatccaaattttgtggtaatttcatcaattatatcaccgtttttcttaagttctgctgccgctgtatataaaaatggatcttttaatccattccacagatgaggattatcaatgataagcgttcctgtataatgtctgattccacaaagtgcgtcctcatcataaattgtctgtgtgtcatcttccgggatataaagtgttacactctgcgaaccagaatctccatttaccaaaacactgatctcatctgcatcaccacatacatatgcatcaaatctgacctctgcgctgccatcctctttcacttctggtgtcacataaaaaccttttccaccataataatcaaggtcaaaatggttctttggcacagtgataagcctcacatccctgtataagccgccataaaatgtaaaatctgctttctgtggatatacgtggtcatttggggaattatccaccttgatttcaagctcattttcatccataagtccatctgtcagatttacatgatatgtagaatagcctccgtcatgtgacgcaagctccttcccattcaggcttacctttgatgatgaatttgctccggttatttcaagatataactgctctccatccttaagttccggttttgcaaatttctttgtgtaaatgcactctcctctgtaataatcggatgcgctctgtccatctgctgcattccaggtatgcggaagagtcactttttcggtgactccctccttttcaaatatataattatcattaaataaatttatttttctcatacttacacatactcctttattactttttctttcatctcattcttctttgcctctatcctcttttgtacctgaaccatttcctcttttgtaagtttacagtttttcatagctataagtgtcacaatccatccaagaattggcatcccaaagtatattatcattgtcaccacaaaaataggggttgtaagcggctcgttcggctgtggcatagtatttgtatatccgataatcgccacggcaccggttgcaatgagtgctgctaaggaagagatcagtttatcaatgaaactgtaagtacctgtaacaacggctggtacatatcttccacttctgtcaagctcatagtcaatgatatctgccataaatgatacatccgctgtggtaacacacattttcgctccgttcagcacaagagtgagtatgacataagctatcattgtaaatccaaatgttgagattgtgcccggatcaattacgataaagaatacaagtgatattactgcaactgccatacatatctttgtccatgtcacaatcgcatttttgctgccatattttcctgcatatctggctccaaagccggcaaatacgattgaaggaagcatgcttatcacagaaagcattgtggcaagactcatatttccaataataataccaaaaagcattgttgtaatcactgcctgtgatgctgtctgctgtgcaattttatcagatgcctgagcgacaatgtatgcctgtaatggtttattttcctttaatacatcaagcatatcctttactttaagtggctcctgtttcttaattcccagataatattccggcttgtcatattctgaaattcctatgcatacaagcacaatgcctgctgctgccacaatcatgcttactctcactgcagctgacaagaactcctgattatatgtccctccaaatttcggaagtaataccatgttaagtataaccgtcattatcataggaacaagatagttaaatgctgtctgccatactccgattgtaggacgctgtttcggatcatttgtcataattgccggtaatgtctgcgctgtcatatttgtaattgtataaccaataacgtaaattacatataacaacgtaaacacaacgattccatggccctttgatgagaacacatcaaacatggcaagaagtgcaattgcttcaataacaaatcctcccaaaagcagtacccttaatcttccaaatttcgtgtccaccttgtcatatataattgctaaaacagggtctgtcacaccatcaaaaatacgtgtacatgtcagaataattcctatgacagctgttgaaattccatatccaacacttgcactatagcttgccataccaattaaagaataaaccgtcattccaaccattgcattacatgagtacaaaataatctgccataattttgcacgacggtattgcacaccgtcaatttcactttgcgttaatttcttttccttcctcataaaaaaacctccctggtatctttttgttaaatatgttttgatctgtatttacattaacatatgatccatgatatagttagagtaaatttgatataaatagtattattttgatatttgtataaaaatcac

SEQ ID NO: 5170 - DNA, 10346 bp, Unknown
  gut microbiota DNA sequence
cttgaaaacctgccccggataaatcaaattagggtttactgagatataagaaccccgctaaggggacaaaattagaataaatttttactaaataaccatgcaggaaaattaaatcattattacgaaagatggagattattatgaatcagacgatattgtttacaccagtgggaggaaccgacccgatttcattaaataattatcatgatggatcaatactgcatatttgcagattctataaaccggataaagtcattttgtacatgtcaaaagagatgttggattttcaggagaaagatgacaggtatcgttattgtctggaccgtctggcaaagatgcaggatcgtcccatggtttatgagatcatagaacgccgggagcttaccagagtacatgaatttgattacttttacgaggatttcaggaaggtgatcagccatatatatgagacgatggatgattcagatacattgcttttaaatgtgtcatccggtacaccggcaatgaaaagtggattgctggtattgcagacattaggggagtttcctgcaaaagtaattcaagtagcgactccggtaggaaaattgaatgagcaggtgcatgagggatatgatgtagaaactttatgggaattggatgaggataataaggaaggtgcacaaaacagatgtaaggaaatccagtgtccgacactttcaaagataaaaaaagaggaaattataaaaaaacatatttttgtatatgattatcaggctgcgcttgatgtcacggattcattaccagcggagcagacagcgcagtatagggatttaatttatctggcggcaaggagagtgttattagattttgtgaatgttgataagacaatccagaaaacaaattttcaatgtctgccggtgcggtcttcttcccagagaaaatattttgaatatgcacttacgatcgatattcgattaaaacgtggtgagtatgtggattttatcaggtcgatcacaccgattgtggtggatttgtttgagatgatattaaaaaaacagtgtggtatcaaagtagacgattattgcgaccagtataaacgtgcaggacagtggaagagaatgtggtcagcaaaaaaattaaatggaacggaagcaggagatgtactgaatagtcattatcagaaaatgggaaaaagatttgaagcaaaagatgtgtattcagaacatctgaaaatactcaccgatcatttttcgagtgatacccgcttaaaacagttgatggaagatcttagaaatgtggaaagtaatatccggaatcttgctgcgcatgagattgtgtctgtgacagatgagacaattaaaaacctgacaggtttttatggcagggatatcatgagtaaaatcagggagctttttggatacacggagatttccatacgaaaagagtattgggattcttatgatgaaatgaacaggaaaatccttgagcagatgtcaaatgaataaaatatacaaacaaaacacaaaaaatgtgaatatttcacaaaagcaatgtataaattattgacatgaaatatttagaaacatataatgtgattggaggtgtgggatatgttacttgaattttcatgcagtaattataaggcaattaaggagaaaatagtattttccatggttgcaggaagtgataaatcacatcaggaagaattgtatgaatttgatgattaccgggtgtcaagaatcacatctgtatatggtgcaaatggtgctggaaaaagtacattgattgatgcggtagggtatctaggctttttggtgagggaatgtgtgaaatttcaggaaggagataagattccgagaacaccacataaactttcagcagagaaaccgacagcgtttgatattcagtttgttgtggatggaatacgttatgcgtatggattttccatgaatgatgttgagtttctggatgagtatttgtatcattttccatctggaagacaggcgaagatatttgaacgtgaaggtacaaagttttcatatggaataaagtataagaaagaactgtctcaactggagagtaagacaaaaagtaataaattatttctgactacggcagaagcgtggtgcagtttaaaagaaatcattcatcctttcaggttttttaaagaagaattgattgttcatggaattggacctgataattggtttgaatactctgcagaacagattcggacaaattctggtatgaaacaaatattagttgtgttcatgcaaaaaataggaattccaattaaggatatccaggtaaaaatagaaaacagacaattgacaacacaggatatgccgcttgaattattaaataaggtccagatgttaactggtatgggttcattgcagacaatagaagtaaagtttgtatataaagattatattttgaatatcaatgaggagtcacagggaacacagaaactttttaaattgctatgtccgtttatagatgtgctagtcaatggaaaagtgttattttatgatgaacttgaagctagtctccaccctgcacttgtagatgaattaatccacacatttaaaaactggaaaggtgaaaaaaatccacaattaattttttcctcccatgatacaagtttgttggatctggatttattccgcagagatcaaatatggtttgcagaaagaaatcccgggttgtgcacgacagagtattattctttagtggaattgaaaaatgtcagaaaggatgacaatataaaaaaaggatatatcaatggtcgatattcgacaattccgttaaagggaagcagtttgatcgaagttttgggaggtgaataaatttggaacgaaagctaggactcagttccagaaatgaaaattccagaaatatgttagtgccggatatgcacgtttcaaaacttgatgaaatgtatgaacagttttgcaaaaatgtggaaacggtaaaagaaaagtttcatattgcagaacaattagataacgttcatgaagaaaaagcagtaaaagatatttatcggtcacagattgtgtttttggaaagtgcactggattattatatgcattgtcttggaatttatgcgatggtacaaatgtataataatcactgggataaaacacggggatattccgatttaaaggtgccgattgataaggtaatggatgctgttatgcatcccgaaaatacagggtggattgacgcggtaattgtgtcttaccatgcatcaaaaacatatatgagtgcgaaagagattaaggggcagttatcattaattgttggaaaagatttttttgataaaatagcaaatgaaatgttttatgacaaggagagcagagtgaaaccagcagacaaattggcaagagcattgacagatttgtttgaacgcagaaacaagatagcacatcaggcagatagaaatcaccagacgggagatttgtatgatattaaccggcaggatgtggaaaatgcaataggtgttgttgaaacatttgttacaactgttcataagttattaacggaataagagtactgcatgacataaaaaagcaagggacaacatcccttgcttttttctcccctctgtgctacactgtcacaagctgacaagacacatgttaaccacatgaaaaacagcaaagaggagtaagaaactccggattggagaaattatggaaaaagtaaaggcattttgtaaacggaaaaacattgagatatccgtgaaaagatatctgatcgatgctcttggcgcgatggcacagggattatttgcatcccttttgatcggtacgattatcagtacacttgggacacagcttaatattccgattcttgtgacagtcggaacttacgcgaaagcagcagtcggaccggcgatggcgatcgcaatcggatatgcactgcaggcagcacctttagtattgttttcgcttgcagcagtcggtgcagcggcaaatgaacttggcggggcaggtgggccgcttgcggtacttgtggttgcaatttttgcagcagaattcggaaaagcagtttccaaagagacaaaaatcgatattattgtcactccgtttgtgaccatttttgtcggggtcgcgctttctatctggtgggctccggcgatcggtgcggcagcgagtgcagttggcaatgcgatcatgtgggcaacggaactgcagccgtttttcatgggaatcattgtatcagtgatcgtaggaatcgcactgacactgccgatcagcagtgctgcgatctgtgccgcacttggacttaccggtcttgcaggaggggcagcacttgcaggatgctgtgcacagatggttggatttgcagtggcaagtttccgcgaaaataaatggggcggactgtttgcgcagggaatcggtacatcgatgcttcagatgggaaatatcgtaaaaaatccacgtatctggctgccggcaactttagcatccgcgatcaccggaccaattgcaacatgcctgtttcacttacagatgaacggtgcagcagtttcatccggcatgggaacctgtggactggtcggacagatcggtgtttataccggatggatcgcagatattgaggcgggaagcaaagctgccattacaccgatggactggatcggactgattttcgtaagctttcttctgccgggcgttttatcatggctttttagtgtgttattccgtaagatcggctggatcaaagaaggcgatatgaggctggacttataaatccataaaagtttagaaataaatccaccataatgaggaaagtatggtatactgtaaacagtagtcattacaggaataatatgcatgaaattgcattttactccgcaaaacaaggaggatttttatggaaaagccattcaccttaagtgagggcgttgacagttggaatacgattatttttttatataattccgcattgaaggaagtacgcacaaaagttgaaatcttaaacgatgagtttcagcaggtacatcagtacaacccaatagaatatatcaagtcaaggatcaagacgcctgagagtattgtgaaaaagttaaagcgttacggatatgagtcatcgatcgataacatggtcaattatgtcaatgacattgcaggtatccgtattgtctgctcttttacttctgatatttataagcttgcagagatgattggaaaacagaatgatctgaccgttatttccatcaaggattatattaaaaatccaaaggagagcggttataaaagttatcatatgcttgtgactgttccgatatttttatcggaccgcgtgatcgataccaaggtggagatacagatccggacgatggcgatggatttctgggcaagcttagagcataagatctattacaaatttgagggaaatgcacccggctatatcagcagggatctaagagaatgttccgatattgtttctatgctggatgcaaagatgctccagctaaatgaagcaattatacaggcgaaagaagcacaggaggagcagacgggtgcagtataattatgacttcgagattatgtcgctcgtcatttttgcggttatcagcggtcatttcctgttgatcagacagtttccaacggttaagtcaaaagtatttggcagactgcttggggtgtgtcttggcgagtgtatcgcaaatattttatcatgtattggactggcaaatgcagcaatcgttccattaatctggaacgaattgtttacgtttgctttttttgcgttagagggagcggcttcttatctgatgttccgctatatggaagaggtatgcagcttttccggagtagcaggtcgaatgataaaatacatgggaaaagtcccgtttttctttttcgagatcatgcttttagcgacgccgtggatgggctttttcttttattttaaagatggcagctattatcagggaaattttgcatggtttggctatgtgtatattggatactatttttttatgaacctgcttcttatatttttggggagagcgcgtattgagacgcggatcaaggtaatcgttatcttatacagtattgtggcagttcttatggtggtgcttcagtatgagagaaaagaaatgctgcttaccagtgcggcaaatatgctgtttattctgatgatctatatggcaatgcagaatccgtctgcttatattgacagtgaaaccggaaccagtgatgagcaggcatttctgatccagatgaaaaatgtaacggagcaatccgggaaaaaagtatttcttgtggtacatatcagacagatgcatcatatcgaaatgcttttaggatatgaaaacagcaggcggctgcttgccgaagtgggacattatcttaccgcactgtgtggaaagttctgtgtgtttcgcaatgcggaggatacatttaccatcctgctggatgagggaaaagaagaacacataaaggggcagatcaaaaaaagatttgaacaggattttcatgtgtctggcaattcgatttctttaaacgaggtcatgatcaccctgcattatccgagagatttttgttctctggcagagtacagggcactgtatggatatttgctggaagcggcacaaaattcagggaaacaggtcttttttgaggtggatgaagccgtaaaaaaagactattaccgcagaaataaggtagagcaggcggtggatcgtgcaattacggaaaacagatttgaagtatattatcagccgatctattccctgaaagaaaaatgtgttgtatcattagaggcgctggtgcgtctggaggatgaaaaacttggagccattccaccggatgagtttattccgttggcggagcaaaacggaacgatcatacagatcagtgagatcgtacttgaagagtgctgtcgttttctggcaaaacatgtgcttccgaacccatcacttggaatacggacgatccatgtgaacattgctgcagcgcagtgtctgaaccggaatctgaaagaaagcatactgccagtgttagagcgttattatgtgccggcacatatgatcacgctggaactgacggagcggacagcagttgaggcaccaaagctgatgttatggcacatgcaggagtttggcaaaattggcatggggtttgcgatggacgactatggaagcggcaattcgaactgttcttatctgatccgttttccatttcgggaaattaagattgataaaaacatgacctggtcctattttgaaaatccaactgcaaaaatcgtgattgaaaatgaaataaagacgatacaaaaactcggtctcccactgatcatggagggcgtggaaaagaaagaacagagtgatgccttagaggcgcttggtgtggatatgatccagggatattattacgggaaaccgatgccggagacggagtgtctgcgctatatcagaagaatgcattttgccaaagaggaatatggaaagagttgatggaaagtttatgctgaaaatagcattttgtgatgatgatttagagatattaaaagaacttggtatcttattggacaaatataaaaaagaaagagacgaagaccttacctgtacggtatttcagagtcccttagagttactggccgcgattgagaaagggttttctttcgatattttatttttggacattttaatgccgggggaaaacggaattgagactgcaaaagaaatcagacagtatgataataatatgaaaattatttttcttacatcctctccggagtttgcagtacagtcttatacggtcggggcatatttttatcagttaaagccagtctgggaggaaagttttttccggctgatggattccgtgcttgcagagtgcacaaagacacaggaaaacagtctgattctgcggagcaaagaaggaattacaagaattaaccttgaaaagttagaatattgtgaagtgataggacggacgctcttttttcatctcggaaatggaaaagtatttgagagtgtcggcagtttagacgatttatttttgcagttaaagccttatggcaattttttacggccacatcggtcatttctggtaaatatggattatatacagaatatttcttaccgtgcaattaaactgataagtcttgcagaaataccaatcccgcatggaaaatgctcggagataaagaataaatatctcgagtatgcgtttaacagaaagcaggtatttttatcatgaatcttctttatgtaacaaatggtgcagcagtcgggatattcggcatggttttgtccggggctttttgtgatattcactggacgaaagaaaaacgggaatttcttgttggaagtatttttgtgctgcttgccatacagggcgtgatgtatctgttggcaggggcagcgacgatccgttatctttatcctgtgatcacacatgtcccgatgtgtattgccctttacattttaacgaaaaaacgtctgtggacagtgatttccgtgctgactgcttatctctgctgtcagcttcgcaggtgggtggcactttttataatggctgtgtttgtgaacagtgaaacggtgcaaaatgtgacggaactgattgttacactgccgttattatttcttttactgcgctttgtggcaccctcggtgcgggcaatatcaaattatcccgtgtcaatacagcttcagttcgggttgattccggcattgggctacggctttgattacctgacgagagtttatacggatttactttcagaaggtataccggcggcagtggaatttatgccgttcgtctgctgtattgcttatctggtgtttgtgcttcgtacttcagaggaggagcggaagaaaaatgaacttgagcagatgcagagctgtctgaatctccagatttcccaggcggtccgcgagattgaggctttgagggagtcgcagaaagatgccagtacctaccggcatgatttaagacatcatatgcagcatctgttatcatgtatcgagaatggaaaaattgaacaggcagaaggctacattcatgaagtatgtgtgcagattgaggcaggcagggtaaaaaattactgtgagaatgagacggtcaatcttattttttcctcttttgcaggaagggcggaaagtgctggtgccacaatgaacataaaagcggtggtgccatatattcttccggtttcggagacagatttgtgtgtgcttttatcaaatgcgttagaaaatgcactccatgcgtgtacagcacaggagcagaagggaacgatagatattttagcgtatgagaagaacgggaggttcttttttcaggtcacgaatccatgcagaaaagaagtagcatttgaaaacggtgttccggttaccgaccggccggggcatggaatcggcgtacgcagtatttgtgcaattgttgaccggtatggcggtatgtacagctttctggtagaagataataaatttattttacgcgtttctttataaggtgcagctttatgctgcactttaaaagaaacaacaaaactacatatgaaaaataaaaagatgtagattgagtgcacattatagtcgattcagaacaagttaatccactgcagcacaaaatacggtacattaatgtcaacagagagaaatgaaaaacaaatgacaaacaaatgacaaaggagagaaagattatgaaaagaaaaattttagcaattatgttgagttcaatgctggcattctcttttaccgcctgcgggaataccgaggagactgctgatggcacagtgacaaacgcagaggcagatgtagatgtggcagatactggcactgatgtggagaccgatgcggcagagaacgatgcagcagatattgttgtggacacagaggcagcagatgcacaaagcgaagatgtggaaacagattctaccgaagacttattctgcctgcttgatgtgccgattttagagatgccggacttagcaggaacaacctggagtttctgtgggggtaacattggcggtgtgcaaatgacacaggacgattatgatgctgcattagagcagtatggcggaaaattggagatcgtgtttagcgatgatggttccactgtacagatggtacagggaggtggaacgttagacggtgtctgtgaatatcattatgaggatgaaggtgtgcgtttaacatttgacaataacggcacagatctggtatacgcctgcgtgtttgcagattttgacggactgacaatggtagcattgtccgatacttccggatacaatgcagtatattttgtacagtaaaggagtatttgaatggaaatctctgtaattgtttgtttgcttgtgattttgcttgccatatggattgtttctgtacggaaaaaattagc

SEQ ID NO: 5171 - DNA, 49160 bp, Unknown
  gut microbiota DNA sequence
tcttagaaattcctctaaaagaacctgtctttcttatgattttatcgtttttcagttcaacttttacctgccattcagcttccagtccgccgaagccgtctgcagttctaccagtcttgcataaagcccgttctttttcatcagttcatcatgtgttccgctctctgcaacaacacctccgtcaagggcacatcttcatcggtcgcgtctttgcgccctatgcggatattttccatgacggtattgttaaagagaaccacattctggaataccacggaaaaatctttcatcatggcaactgaatcgatcggtgcaatatccgtgccgccaagtgtgattttccaccgttcacatcgtaaaaaccagccgctaaatttgcaaccgtactctttgcacacgatcgcagcatggaaatttttaaaagatcagtacaaacactgcgaccggcattaccactgcccccgtcagatcaggaagctgatgtgccagaaaattttcggtcaaccctgcattgtcatcgatcactttccgcagacgtccgctggcgtttgcgctaaaatatccctaacaacactttcatttcccgccacaatcctatcaacacttccgcactccagacacaacaatcccggcgaaaaagtccagtattccaccaagcgcaatcgtgcctgcaaacaacagtatcagttccaaaagatcacaaaaccgatcaataaaaagatgatcgtatcagacgcaaagagttctcccaatatcggtaaatacctcatattttcccccctctctaatctattccagttttttcataacaagtccaaacagctctgcctttttccaccatcacaaaaaactgacagacacaagatgccgctcagcacagttccttcacaaaatttccaccttcaaaataaatatcatttccttcactgtctttatgaaacgaaatccgctctgttccaaccaattgaaaaccaacactgttaagtaatccaacagaagggagattattttttgctgttccggcatatctctaacaatgcctcatccctacagccccagcctccgataccggttcacgcacgcaaacacttcctgctttcttggcatcgcaagtccgcacggcagataactactctcgcagactgctgcgatccccttcttctgcaaaacatcccaaagcgcatcgactgcctgtgtcagggtgtgttttccatcaaaaaagtggatctgcatatattttaacatatatccgagtgctgcaagctgctccgtgtccataagctgttccacatagcggacgtcaatgacttcccggttgatagagatagaatcccttcccatcgttttcatctttaagcggttgtcctcttgaaacatccggtccggctttatttttctgtcaaaatcaggctgctttgacggggcaatgtcctgttttggaagcgggaactctgccgctgcctgctttgctgactctgtgatctcaaacggctcgtaacggttcatctggataatgcagtccgccttgtgaaaataggaaccggagcttccggcaacaaggaccgtcgaaataccatatgtgtgatacagctcctcgacacggtcaataaaaggtacgatcggctcggcatcacgattgaccacgcgctgcatcagttcgtcacggatcataaaattcgttgcactggtatcctcgtcgatcagaaatgctcttgttcctgcctccatcgcctcgatcacatttgccgcctgggaagtacttccgctggcatcctccgtataaaaggataccgtatctttcccgtttggcaggtcatggataaacatggaaatatccacgtcacggatgcttcttccatcctcggcacggatcttcattgctgtatcgtccgtgatgacatactccctgccatcccctgcaatgtggttatagacacctgtctcaagcgcttttaacagtgttgattttccatggtaaccaccgcctacgatcagcgtgatgcccttctttattcccattccggtcagttttccgtggtgtggcagcgtcagcatgacggagagactttccggtgactgaaaacgcactgcatccttcatcggtctgcctgagacaccggactccctcggcagaatcgcaccgtctgccacaaatgcacaaagtcccatcggatctaactgctccctgatatattcctgatcttcggcgagatctgctgctgcctctaccgtttcttttttcagtgagcggtaatatagagaccctttcacacactccggcagaaaatcaaagaaaatcttttcgagttctcttgcattgaccgttcttccatttgccggaaaaccaatctccatgcgcagcacgatatcgccgttttttgcatccatctgacaggcactgcgctctaacacttcctgtcccggacggctgaccgccataagaccgctctttccggaacctttcgctttaaaggaaactttctcgacctggcgcgcaaactggcgcagcagataatcctgcacagcgattcttctgcagtctttctgataaagatgttccgggaatcccgcctgttttccacggacatggatgcttaccttcgatggtgctgcaaacggatctccctgcacatggtcaatggaaagcacatatccaggaaactcataagtcccccttgtgtccttatatgccggataacctttatggtcgatacgctgtaataaattttttaactctgctgctgtctgcataattccctcctgctaaaaaagcatactttcctgctctatcgtacaaccggtttttaaaatataatccttaagttcttttaattctgccggaacttctgtgtcccttactttttgcaaatatttttcatcccgtttttccccatattcttgatatttgaaaaacgtctccccatccattgcaagcggtttcacatccggaaaaattttctcttttatattcataaatatacggattccgccataatctaagtcactggtatgaaaatactctgccccctgctctcccagacactccctgagatttttcaggaaaagcctctctttcggtgagaaaaaaccgtgcgaatagacaagcagcgttccctcttcatatgacatttccataaaattggctttattttcaaccgttacaatttttcgaattgtctgctccggcaatagttttgcatattttaatgtctctgcatttaagatcgtaccataggcaaacagggcggtatcaattttgtttcctgtaagttcaaactgcagcgaacctttgacagaaagttcctgatggtatgtctcaatcccaatttccgataatacttcgtcatttcccataacttcttcgtcagcatccacatccgggcaaaattttctcgcatccgaaataattttatcctggactgctctctgaaatgattttgaatttttcaggtattttttactgaatatccgtcttgaaaccggttcctctatctcatttaatccggctaacgtgttaaaataaatttcctttgtttcttcatctttgcatattttcggaattttttcacgttccaggtcattttccagctccccaatacattgatcgatccatggtttccaggtctgctggcgccctcttaatttctgtaactcctgacgaagtttcaaaaatggttcaaaatagcgctcatattttggcacccgcccatccatttcataaaatctcggaatatcagacaaacgatatacgatctgctctagttcacttccccttgtgtaccatccacttatcttctgcccttttccatcctgtaacagatgacgtgcctgcaactctaaaacctgcctgttcagctctgtttttccgatttcatcatacagcgcctgaacgattctgatagaacgtttcccatcattttgcccctgattaggatattttctccaatcagtatcgccatgttcataatcatcaaggatcacctgaacgatactggttcttgtctctttttccttctccttcttcaaccgctcttactcctcctccacaaccaactgtgaaaaatcctttttctcaaactcctgaatcgaaatgctcttcttattcggattcgcataaacgaatgtcttatctacattttcaatgtaattctggatcttatcgttcgttgcactgatgatcgcctgaaaaccaagcccgcggatcagttcgatacagctcgccactttctctgcatccatcttggaaaatgcctcatctaaaacaacaagacggatcgtcggacgtcttgtcagtcttgcagacagattgatatggtatgcctgcgcaaaacttgcaagtagtgcaatgtaaagcgggttctgtccctcaccgccggaatttttcttgatcatcttgctaagaccaatgacaagacgttcatcaccttccacgatctgttccatctcaaatgaaagatacgtacggtaatctgcatacttcaccatgttctgttttgcctcatcaagttcctgctgtgtggcattttccggcggaataaagatatggatcagatcactcatcaacataccgtatttattttcatgctccatcgaaaacagattcatctgatgctccatcggcgatgcaagtgaggacggatcgatatctaagtcctcatccataaacatatcataaaatgcgccgtcggctcccttatttctcgtgatcttaaactgatagcggtctttaccaaaattcaggttgcggatgatacggtttaattcatccctgcgcacataggcttctttgatagcgctgcggatcttgtatacaaaatcctccttaaaatgctccactgctgcctttgcctgctcagccgcttttttctggtattcttccagttcattgcaggaaagctccgagagcaggctgtcataatcgtcattattctctgcgctcgctgagaaatcacgttttggatgattctgaagataattcatacgtacatccaccagtttatttttctgtacatcacactgaccggacacctgttccatttcttcctgtgtcgatgctttcaggctgtcatattttttatttttctgcccggcaatataaacctcaaatgcctcttcttccgcagcggaaccgcgaagttctctttttttcgtaagaagttcctcattttttgtaatgaaatcactgctgtctttttcaatggcatcttcttttttccggatctggtattttaagtcatcgatcttatcttccagatctttttgtttttcgtgaatctcttctgcctgtttctttaagatttcaacagtaccggcaccgatctctgccattttcttttctgtttttgccttttgtttttccttttctttcttctccgaaagatctgatatcaggttctggtattcctcaaccgtatcatttaaaaattcctgggcaagaatatttttcgcctctgtctcacgctctctgtattctgctctgtcctgctctaatttctccaggctggctgcaagttccttctggcgctgtttcttactcttttcaccaatatatacatgtttcttataattgtctggatttaaacggcgtaactgataactctggtataataaacagtctgccgtcacaccgatcttgcactggcgcagttcgtccaccgaagtacacttgatgacatttccgagtaagaagtccacaaatgccctcacatatggctcttttgcttctacttcttctgcaagcgcattgtcttttacgcgccaatcctcctgcatcagcttttccgtatccactaaagatacacggaagaaacgcttctcgtcgagtgtttcgtatacttccatcgcctgtttgacataggcaggctccacgatcagcgcaagtttgttccaggaaagataaccctcgatcgcattacgccatgtttcatctttaatatcaatgagatctgcaaaaatacggacctggatattttttccggtctgttcagaaagttttcttgcaatttcggatctcgcaagttctaactctctcggatatgcttttttaccaagttttaactctgtgagttctttctctaacacatccgcttctttattcatggaacggatctccgaggaagcctcctgcctgtccttttctgcctctttctgcacttcgaccagacttcgtttcaaacgttcgatctcctctccggtgatcgtgccttctttgaatttctcgatatcccatagaatctgattcgaaacgatatctacatcttcccagccgtttaatcttgcacagataccatcccacttgtttttacttcgctctaaaaggcttaggttttcttccagactctttaactgctcttctaatcttgcataaccggttccggcgatctgctcattgatctcgccgtattctttttcataattttcttttacctgaagcaattctgtaagactttcattctgcagtacgacatcctttttccagttttccacacgctgctgcatttcctctatggtctgctctaactgtaagatcgtcagtttgtccatccggtaacggcagtttaacagttcttttttcttctcctccatcacctgatactgtgcactgatctgctttaattcttcgatttcctgcatcgtggcttcgatcttacggcacattctgccataaagcatcgccccctcctgcatgtcctcgatatggatgtcctgctccatgcagatatattcttttacaaaatcctctaaccggatattcattttaaatgggatcgcacgcttaaacaggcgcgggaatttttccatatccagtccgcctaaatagacatcataaaggtttctgcggaatctctcattattagaagtgtaaaacatctcatcttttgggaaattctgctgtaaatagctgcgcacttcactgatcgtcattgcgcggctctctgtccggtaatcccccgggatcagctcgcccttatgccagaaaaacagcctgtttatctcattggtagcggtctccacatcaaacacaacaccgatacattctttttcttttgtgatcgtctgttccatctcaagaacgatcgtcgtggaaaagtttttgtttcgcttatactctgcctgattattctcaccaatgttgatcatgccgcgcagatactcgatcaggcttcggtcagaatcatctgccgctgccttgttgaaaaatccacgtccatccgtgttcgcataaagcacgatctgcatcgcatcgattacggtggactttccactgccggaatgtccggtaaaaaaattgatgctctcgtttaaccctaacaccttacggtcaatataatgccagttattgaggcagattctggtaaaaactttatatgcctgattcatctgttccatcttctgtctctccttcctcatccacattcatttcttctggttcaagatcactttcttcatccgtcatatcattttctgaaagtgcttcctcactgttccactccagattctcctgaccggctacctcatcactttttacctcatcagaaaaactgccgagcagcccgtttacatcctcccgcatcagcactaaattgatgcacggatagatcatgatcctcgtattttcaagctgttcttcgaacacatccagaaattctaccatctgatatttctttaaaatagcaaatgctttttttatctcagtcatggaggacggacctttgatcagacggaactctcctgcttttccattcagttctccaaacgtcgttataacattgacactggaggaaactgccgccatcttttcgtcgtagatcagttttaaaagcagcaggtaaatcgttgcaagtttcggcagtttctccccgattccgtctgttccctccagataaatgattccaagctctgtatcctggcttagttttatccctgcaaccgcaaaatactccgtcagaaattccaaatgcctgtcgcaaaaatcgtacatgcgatccggcatcatgcgtccgtattttttatcatattttcgttccggcagaaatgtctgggagagcaatgttcttatcacttcctgcatccgctccacatcctgcgtatttaactcttcgtaaccttcaaacattaattctgttcactttctattgatttttgctttgtgctaaaagtcattttcggataacaataattgccattctgaatctgactatcctccacctgtacccggtatctgctgtttttgcgcatactgatatcgtaggcaaggatcagcttttcaaatgactcatcatccgctatatccatatgttctgtttctaaaataccatctgtcatcttctcttcgatgaactcttcgatctgttttgccgtataacggtgttcaatcttatttaagcgcagtacatcttccctggaaagctctgcatcttcctcttcttcctgcagatcatcctcaaattttctgcggcgtcttctcttataaagaggattatcactcaaaacatcaaaagatgacagattcatgtgccccgccacttcttttaacatctcactctgttcactttccgtctcagccgctccaagtctgttcaaaagcaggatcagcataccgtgacgctctgtctcatcactgagcagataatttaaccggctcacagttgcacggatatacttgctgtgttctttgtccatgtttgagatccggtgttcaatgtcatcaaatccacgctcgatctggtcgatcagatccaacacatcttcctgtctgtttcttctcgcatgtaaaaatggcagatcctcttctgaccgctgcggttcaagtacagaagacctgcttcctgcatttttctgctccatgcgctgtttctgccggatgcgctccacccagacgtcatcctcccgcatttcctttaaccagcgtttaatgtccattttataaatataaaaattgtcactcgtctttaaaatgtggtatttgcgtctgacaacttcctccacatagccctctaaatgctcctttaacagttcgtcgtaagactgtttgttcaaaaggcgttcaaaaaatttatccatgttgtgcagcatatcctgcagtgccttattcagttttctggtattgacaagtgctgtctttaacatggcaagattcatgcggtggtcattcttaaaagaaaaaagagtcgcataaacattctggatataaagatccgtgtcatctaacggttcgtccgctaatttttcaaatgcctcgatcatcactgccgcataatccggtatgacgatattggtagtcattgcctcataatcttcaatttttctaagccattttgtgcgtaccagccagtttaggattcgtcccggcaatgcagtttctacatcttcctctgtctcattatcctctctcataaaggcataacgacgagaggagcacatgtcacttaaaatctggacacatgcttctctgcttaaaaagtaattgttgtactggtattcgtcattgatggtcagaagtgcttctatatagatgtcccggtttacggaccggaacaggccccagaaagatgctgggatgtcgtatatcaatttcacgttattctttccttactatcatttcttacaatctcatgatacactgcttatctgtatctgcacacgtcttatttttgcacaatgcatgcagcatatccgtctgcacacactttatctggtgcgtgattcatgcagcatatccatcttcatctcgtaatatgccggactcatatccagataatgttcatgtggattttcaaaacgctgttcttcttcccacacttcggtattaagctgtttttccacataagctctgatatcttctaaggtttccggctccacgatacgttttcctgcctttacgacctgctgctgaagttttttcgctgtgcagttttcaaaagaacggtttttccatggtttttccggatccgcatagcggtatggcacagacatatcaactttctctcctgcctttgtgatcagatctgcaacggaatgtcctgcttcatcatagatacggtacacatctttgagtcccggatttgtgatcttctccacattttctgagatcttgatacgcggggcaaatgtaccattttcctccactgccgaaatcttatatacggcaccaaagacaggatctgattttgcagtaatcagacgttcaccgacaccaaaactgtcgatctttccgccctgctgtaaaatggatgtgatcgtatactcatctaagctgtttgaaacaacgatcttgcaatcctctaatcccgcatcatctaacatcttacggatctttttggaaagatatgcaaggtcaccgctgtcgatacggattccctttaatctttttcccatcggctctaaaacttcttttgccacacggatcgcattcgggataccggaaccgatgacatcataagtatccactaaaagcactgtcccatccggataattctctgcataatgtttaaatgcctcaaattcatccttataatacatcacccagctatgtgccatggtcccgctgaccggaatatcaaacatctgaccggcaagcacagttgccgttccgacagcgcctccgatataagcagctctggcgccataaactgcagcatccatattatgggcacggcgtgcaccaaaatcagagacagcccgtccctctgctgcactcacgatacgtcttgtttttgttgcgatcagcgattgatgattgacctgtgcaagcagtgctgtctcaataagctgtgcatcgattaacggtgcaaccaccgtgatgaccggctcattcgggtacatgatcgttccttcccggaacgcataaatatcaccgctgaatttaaaatctttcagataagtgagaaaatcttcggtaaaaatgtgaagtgaacggaaatatgcaatgtcctcctcatcaaaatgaagattttcaatgtactccaaaatctgctctaatcctgcaaagatcgcaaatccaccgccgtccggattactgcggtaaaatacatcaaatgcaactctcgtatccttgtcctgatcgttaaaataaccatttgccatcgtcatttcatacagatccatcatcattgtaagatttcttgtttcactctgtttcatcataatcctccatacatgcgctgttctctgcgcagtctgtatttcctatcgattcagttctgataagatttcccgttttctctttccgatcagaagctgttcgttatatgtcatataccgctcacaggtatgctctgataaaaacattgccgcttcgggtgttaaagtcagttctgtcacaaacacgaccatctcttcaccattttcaaacgcctgttccataaaatcaaatgcatgctctaacgcattcaccgcttcctgttccgcattctctaaagtttctctttgtctgtcaaatccggcttttgcctgtgtaaaactctcttttgcatccaatccgccgttcggtacattttctttccagagcgcaaaaatacgttcccatctggctgcctgtgccctggtgcagacttccgcctgcttctctgcttccaccactgccattctctcctcaaacaatgcctgatagcagtccaccggcacttcgccttctttgagtcttctttgatattcttttaaaaatccgtaccagttatccgcgatctgtttattttcctgtacatttccaaaaaatgcagacagaccgtccaataaaagattcactacgctcagtctctcatcgaatgccgccgcatagattcttgcaaaggtctccggtcttacttttccggcaaggatatccgcgatcccgtaatcatcccggtacttgcggtacagttcaaaatatgctgctgcatcctctgccacgtcctcgtgatggataaactcacggatgacactctcatctaccggcagatccagtttctcataaacctgcatcagactgctcaaatcctcccagccacgcgctgtcacgaaacggataccatccacatctgcctccacacgataaaagtttttctgtctcagttccagatagcttaaaatggcattatgaagatgttttgctctcgcatattctttccagactttataatcagcttcaatgttcagataacggacacggtctaaagtcaccatatcaaaatcacgcaccgacttattgtactccggcggatttcccgctgcaacgatcagccagccttccggaatcgcctgattgccaaatgtcttgcactgcaaaaactgcagcatcgtcggtgctaaagtctccgaaacgcagttaatctcatcaataaaaaggattccctctttctgcccggtctttttcattttacggtaaatacttgcaatgatctcactcatggtatattccgtgaccggatacgttgttccatcgaaagattcctcttttatcattggaagtccgactgcactctgtctggtatgatgcgtgatcgtataagcgaccagaccgatcttacactccatggcgatctgttccatgatctgtgtctttccgatgcctggtggtcccatcaaaaggatcggtcgctgcctgatcacaggaatacggtattctccctgttcatccttcgaaaggtaagccattaccgtatgcttaatttcttcttttgcctgttttatattcatttctgagatctcatttctttatttgttcgcctattatcttaatacattttggcagtttttccaatcattttatgctttttttctctttctctcataataaatcacacaggaagcacgcaaaatgattccaaacacagtagcaagcggtgtcgcaaatccgatccagacactttgctcatcgcgtacgaaacagggattctcacaagaaaagtacttaaaattccctgcaccgcaactgttgcaagtgcagcccctgccacgcccatcttcagtgcgccgaccagcgcaaagtcagctgcaatattgacgacacatacaacacccatgagggctaacggtgttctcgcatcccccagtccgcggaacattctaccgattgcgttaaacatgacgatacagatgataccgattccgcagatacggatataatcggtcgtctgggaaaatgcttccgccggcgcatttataacagatgcgattccgactgccaatacagcaacgatcgctgcgagaaggattcccaccgtgacaaacagccagagtgcagagccgactgtccgctctgctgccgcctcatcttttttaccgatattctggccgagcaaaacggtacatcccatcgtaagtcccgtgatgatcccggtgatcgtctgcatcatcatgcttccggtcgacacggctgaaactgccgatgcatccgcaaataagccgaccacaaacagatcaaccgttccatagagtgcctgcaaaaggtttgctccaaagatcggcactgcaaataataacaattttttccatacgcttccgcttgtaaaatcgtgttccataaaactctccataaaaaaactgaataagaaaccgggatttccacccggcttcttatccagctcataatatcgtaagtattataaaccctccgatgaccacattattctataaaatcttatggtttctgtcaagagttctgactttattacaaaaccattataaacccatgaattcatgacatggaatctgttattctgcatatttcatcagtgcatccacgatctttggatatctccaggtaactgttttccggtcgagcagtccgaacagttcgccgtccccggtaaacgcattgttatcccaccagttacagctcatgccgtaagcgcgcgccgcagcaatgtagtatgccgcatagtccacacggctctgcagatttccgtttttatcccgggcaccaaactctccgatcacgaccgggatctcattgcttatatatttcgcatatagtttttccatcatctggtcgatatcgttggtacttgtcttttcagaagcattaaactgatcaatactctcattttccgttgccgcctgcaatgcaaaatgataaggaatgtaagcatgcaatgagacaagtatctttccctcattttccgcagtgtccgtcggcagcacaaacttgtcattcaacaccccatccgcagaggcatcatagccaggcaccatcagataacgtgtggcattattgccccctgtctttcgcacaacatccacaaagttctgattccactcgttgatacattctactgcttccacacattccgcagcattcatatccagccaccactcatgatctgtctctaccagacgcggttcgttgatactctcaaagatcacatgctcgtcataatctccaaaacggtctgcaagctgctcccaaatgaaagtcatgtaggaaagagactgctctaaatgctctttgtccgggtaacagtactctttatccgtatcatgatggatatttaaaatcacatacatgtcatcatcaaccgcataatccaacacttcctgcaccctgtcaagccatgcctcactgatcgtgtaatgatctcccgatacatgattatgccatgacaccggcaggcgaagcgttttgaaacctgctgcctttactgcatcgatcatttcttttgtcgtcttctcgccgcaccacgaccactcaatactgagatcatcttctttctgtgcattcgtaattgcatcaaatgtgttgccaagattccatccgatcttcatatcccgcacaaatttcattccgtctgtatcaggtatctccttcggttcaattacaacttccggtatcgccacaccactatcctccgtttctgtttctgcactttctgtctccgctgctgtatcttctgctgccatatcatttttttctgtggtattattttcagaatccatcctggtctcacttttttctgccgacacatcagcggcattgcccgtcaccgttttttcatctgccggattttctgcgccacagccaccaagcagcatgcatcctgccatacacagtgcggcgaactttcccaacttatttaacttcataataatcctcatttcaaaacaatttgttttgccagggaacaacttgcttcaagttttatcttcttccaatctccgtatcagattcccctgtcacactgtgttcctttatatatgaaacgatctcatctgccgttgtaaatgcaagaccgacataactgtccgctgccccataataaatggcaatccttccggttgcagaatcatggatcgttgcacacgggaaacagacatttggaacaaatccacgttcctcataccattcttccggtgttaacaggaaatcggtgcagcggtattttacaatagatggattttctttgtctaagatcgccccgccgatcgaatatacatatccgttacaggttccactgacaccgtgataaaacagcagccatccatcctcaagttcgatcggtgctgctcctcctccgatctttaaggactcccaccattcattgccgcgtcccatcacatgacggtgttttccccaataggtaagatctttactctcacttataaaaatatcaccaaacggggtatgtccgctgtcggaaggtcttgacagcatcaggaaatttccatttaccttgcgcggaaaaagtacagcattccggttaaacggcaggaacggattttcaattctggtaaatgtcttaaaatctttcgtttttgccattccgatcgctgcaccgtaaaaatccccacaccagatgatataataggtatcctccacttttacaagccttggatcatacgcatataccggcataaaatcattgccttcttcatccacaaaacgtaccttgtctttgtcaaaatcccaatgaataccatcctcgcttcttcccaggtaaacatacgggattccattcgtctgctccccacggaatacgccgatgaattttccttcatacggtattactgcgctgttaaaaatccttgccaccccttctaccggatttcttccaataatcggattctccttgtagcgccacaccggcgcatttacgattttctccgacctctcctgccacggcatgttcggcactgccggactgatcatttttacatttcccatcttgtctgctcctccattctgcgcatctctcttttctgtttttatgtttctgacaataaaacccgtgcgctccttctcctttttattcatagcggcatctgttctgccgtttctgactcatttcatttataattctgttaatccgctttctgacttatttacggctctgtcgccgctttcccagtcttctctggctcagtttacggctctgtcgccgctttcccagtcgatttccggatcacaatatgtccgcttacgacacgtctcacaaatgtttcccgtttatcattgaggcgttctaacaaaagctccacgccctcggacgccatcattgcgatatccacatccacagtcgtgagtcccgacgcattgcgtcggataaacggataattgtcaaaccctgtgaccgatatatcctccggcacactgtatcccattttttctaatttttcgatcaggatacaggcaatttcatcattgttacagacaaatgccgtcggcatatcctctggcagagccagttctttaaaaagtctgtcctcacctctgtcctcaatcagataatcctcgcgatataggatattataatgatgtaatgcccttctatatcctaaataacggtccataatgctcgtagtggcattgatcgaaccgacataggcgatctttttatgtccaagttcaattaaatactccgtcatcttgtattccgcgctgatattatccatgctgacagaatccgtctccatggagagatcataaaaatccatgtagatcatcggaatattcatctgttttaatctttttaaatatgtctcgtctaactctcccatcagaatcagtccatccagcctgttatcccccacaatctgcggcaggatcatcatttcctgcatcctcgtatccaccagttccaacatcgtcgcataatcgtaattggtcaggcattttgcaacacactggtacattttcatataaaatgcattgctcgtgtcatctgtatagtaggaaggaatgattacaccgacattatagtttcttccctccttaagcccctttgctccgaggttataacgatatccaagcctgtcggcttccttttttactttttcacgaagttcctcactgactccttcttttcccgtgagtgctttcgacacggagacgatactgactcccagcttttccgcaatatcacgcatagtcacgtttgccatctgaattcctcctaaaaccgcttaccggtaataccatttttcttcctcttctttgctctgtggctttgccatatattttcttaagatccgctccataaggaaacttccaaaataacagcacactccaggcatcacaaagatcatcgggatcgggatcaacagcgcaagcactacaccaacagccacaagtaataatagcagaatcgttgtcggaaggtgtttaaagaccataaacagcgccagcttaaaacacgaaaatacatccatcgtaaatctcgacaataccgggaacagatagagcacgatccctgcgatcacaaacgcaagcagaagatataccatttcaagtgcccctgccacgattgaaacctgctttaccgtataactgtgatcaagccacagcaccgctgccaatccaggaaaaataaccgtcagcacgatccctgtctttaaattctgccggtaagaacggaaaaactcttttgtcacatacccttcctcacaacgcacggcttttaccatcgcataatacatcgcgatcgtcgatgttccgatcgtaatgaccggaatacatccgatcagccacaaaaccgacactaaaagtatatttccaatctgatttgtcaccttaaaaaacttcgtctccggtccaaacatactgttcatgttcttcgccccttttccctgaaaaaaattctgcaaaacagatatcggtcaaatatttcttttgcacagttcttttcttaataaatactttaattctgctccggatgtcaaaaggttatgccaaacacggaataccttttgacatccagatcataccagttcactactggatcttcaacgtatcaatctcatcctgtaagatctgtttgttagactcaatcgcctgtgatactgtgctgtcgccatttacaacatcaccgtaaaatactttgctgactgcaccctcagagtcaatgctgttccagagatcattatttgcaagtgcgccaagtttgtttgcaagtgtaacctgatcctcatcaacaaaaccagactcaaaccactccggatcatcacgataagaaatatcatcatgataccagttcatcatctcctcaaatacacagtaaacagaagttgcatcctcaacaccaaccggaatcatgtagttgtttgtgatcatagccggcgtcatgcttccatctccgcttggtccaaccggtgccgggcagattctcatatcaaaatcatgattgtcgatctcctggattaagatccatggctgtgcaaatgcgaaagctacttttccggaagagaaagctaagaggtcgttgttccagtcatcctggtaaggtcttgcagatttatctacattgtataactggtcgataaagttgaacgcctcaaccgtcttaggatcacttaatccctctgtggaggaatctgcgattgtagcgttgttcgaagcgcagaatccctgaacagtcagagtccatgcactgccgtatccgtatacatccatgttgccgtcgccgtccgtatcctgtgtacatgcttttgcatattctgcaaatttatcccaggtccactctcctttttcagcaagagattccggtgcctctaaacctaaagaatcgatcatggctgcattgtatgtcatatacatggcaccggacggaatcgtggtcgactcatggaataagtaatcatcattgccaagcagattctgtcttgtgaataccgttccgtctgtcaggatatcagagtcagccggtgcataatcagaaattttctgtacatatccatttgcaaccggtgagataccaaactgaagatctgtcaggtagatatcgcagtccggtgtacctgctgtgacagatgtattgatgctgtcaatgattccatcccatccaaggtttacccactcgatcttgcagttccatttttcctctacggcacggactgcatcaagtttcatctgcatggtctcctcatttgtccaggaaccgcctgctgcttcgatatcatctaaagactgataattgctgtcccagtattcatcccaccagagaccgatctttatggttcttccgcctaaatcctttgcctcgtagccactgtcagccactgctgcatctgaactctcctccgtatctgctgcggtttcggtttctgcactctttgtatcttcctttgtgccagcatctgctgcgttatttcctgcatctgcccccgtgttcgcagtatttccgccgcatgctgcaagtgatgctgcaagtgcacctgccaaaagtactgaaaccaccttgtttccaactgttttccttctcatgtgaaaacctccttcttataaataaaaatatattgttttcgaagttaccattctaaccaacgataccgctgcggctggctccctcgataaaacgcttctgtaacaaaatgtagataataacgatcggtatcaccatcaacacgattccggcatacagataaagctgtgacactgccgtatccttgatctgatcgataaactcgatcgatgcccgcaaagtagaaatccgcatgctcatgagcaattttgagttgatggaaaataattttgcataaaatgtatcattgtactgccataccagtgagaaaatgctgacggtaaggacagacggcatcgcattgaccagcatgatgcggaaataagtgtaaaacgatcccgcaccgtccacgaccgctgcctcctcgatttcctttggcagtccgcgaaaaaactggttaaaaatgtaaatgtaaagtcctgaccgcagtccgcatcccaatgctgtcatgatatacattggaacttccgtactaagaagattgatgccgtgtcctgtcacaagatgtatgattccgaagatatcaaagttacggaactgtgtataaagcggaagcatcagcgtatcattcggaattacgatcgttaagatcacacagccaaacaatactttcttaaacgggaactcatatcttgcaaatccataccctgccatggagcagataaagatctggatcagcgtcagcgatatcacataggcgaacgttgtcgcaagcgtcctcgggtacgtcattcttgtaaaagatgtaatatagttctgcagagtaccctctgccggaagcagcatgacaaccggattgtagagatcgtttgccgtaaaaaatgaatttgcaacgatcgtgatcagcggtcctaatataatgtaggaaataccgacaatgatcaccaccttaagcagccagatcagaaaacccttgatctgtcttcccgctttctttacctgaatctcatcgagaggctggtcttttaaatttctgatattcatatactctgccaccccctaattatagtaaaatactttctttgaaatcagcttacatacaatgaccagcaatgcgatgacgatcacggaactgagtaaactcatcgcaacactcacgccccagtcaaaattgacaaacgccatatcgtatgccttttccacaacatcactgtctacgaaggaatccacgatcgtatacacaacatttgtgatgataagcggagataccatcggaaacgtcactttccagaatgtctcataccctgtcgcgccttcgatctttgccacctcatacaacgctcctggcacggactgcagtgctgcgataaagataatgatctgcacgccggatgcctgcacaatgtcaaagatccgtccgactgccgctgtgatataatcgagtagtgcaaccggaaatccgagatccataaacaggttcataaaatagtctacattcacacccgatgcaactgccgcctccgcagatactgctgcaacaccaccggtaaccgcctcccttgccatctcgatcgcattattgattgctccggcattcatgatgatcggcagaaacagaatcgcacggactaacgttcttcccttaaacttaccattacagatcatcgcgataaacaaactgaaaaaaataatcagtggaacatcaataacgatatcccggatggaagtcgccaggatctggttgtaagtcggatcctgaaacagtgcatatttgaaattatcaagaccggtaaacttcaatgtatatccgccggattcaagcatctccatcttgcttaaactaaaccgcactgcctggatcaggctttttacatagaaccataaaaatccgatcagccatggtgtgataaatgcaaaacctgtcagggcacgtttctgcagtaaagataactttttctttttcttcattatgccttacctccctttacctgataactcattgcatctacagtcacaccgtcctctgtgatactcttatctgtcttattgatataaatgctgacaccattgtcatactcggtcctgacaaggccgccctctgtcacttcgtgatggatcatcgcagcaccctgcacctgatttaaagctccgttgatcgtctggtaaacatttacggcatcactcatccaggtctggtagcaggtggaatactggtccgccgaggaagtatatttcatgatgcttgaatcttcccaggaaaatgtaaatctcggtgcacagccatactcgatgtaagtaagaagcagtgcgtcatcaatgtcagcatccctgagatttaatgcctccccggaataatcaatacttccgtgaatgaccatctgataaaacggcacctgctcatcaatgatgtaaaactgactgtactccaccggtgcgtcgatgatgtcggagacataaccgaaggtgtaagcgttgccgccctcctccatcagcgtcttttccgtcgctgcaagttttccatactgcgcttccacgatctgttttgctgcctgtctgtcgatcagctcggttctctttttatcggagactaaaacattcgaaagatccctcagacagataccgctgatctcgtaatttgtgatcttatccgtaaatttgtctacatagcggtttaaaaacttcggtgagatcatataatatgcgagctcgtcataccagtttaaggtacttgtctgccgcatcgtcgcaggattgacggcaccaagttcaaccacataaccggaataatactttgacgcctcaagcacatcgttaaaacgtttggaagtatacggtactttctggaaggaaacatttccatataaagctccaccattttcctctaagacatcacttaaatgttcaaaatcttttttacttccgactttcttaaccagtttgatcttatctgccacatcatgatagatgccgccgttgaaccagccttcgtaattcatacggatctttgtgatatcctcgccgtaaaactcctctaagatcttttccgcttcctcgtaagtggtcatcgcagagattcctgtgtaaggaacacccatcacatgttttttcgtctccacaccgccaagaacatctaaatacaacgggatatctccggtgtcgtttgtctcctttaacacaccctctttgatgagctggctgcggtaacattttgccatgccggaataatctgcctcatccccagaaaggaaagaataacataccgtaagattttcatcgtaaatatcattttcaagtaccggcacatccgcctgatttccgctgacaccgaacatattcaatagttcgatctccctgacacagaactccgggtaaacgtaattataactgttaagttttccggacacatccgcatttacgattgcgagtgcatcgccgcctgtgatcctgccaagaaatgcactatcgccatttttcattccaaataccggaatccttgcatcctctgtatactctgtcacaacatagctctgtacgaccgggtcgatcccgtagatattctggctgtacgctgcgtttttacaaccgttgtttaaattgatcagtgctcccgatccgtccggcacgaacatatagccatctgcatccgtccccgccgccccgaagaatggaaggacacggatccttgagatcacggctccacccttctcctcgatttcctttgtcggaacagaaacgctcagcccgttttctgtcagccggtactcaatcgggattgtaaaggaaatattctccttctcatccgtctctgacatatccacggcatagtcatctgcggtgtatcccgcctgctcgaacagtttatttaattttcccattccgactttcgaggactgtgccttttcattcagcttatagacgccgtctttcagacgaaactttgcttttaccgttcttgcatcctttttgtctaacttatctaacaccagtgtctgaagccgctcctctgtgatctgcaacggtacgatacctgttgccgaatcaagatctgcaagtgtataggtataacggatgccattttcaatactctctgcggtaaactgtcctttttcgatgctcatatcataattgttcatcgtcgcactgtttctcgccgcattgtaataggtaagtgtcagtgtcgcattcagttctgccgcattcacaccagcggcaatcgcatcggaatcgcgctccaccggattggaataggtgatatttccggattctttttcgtagactgcgatctctgtcgtttctgtattggtataaagttttaatgtatcgttttccgcaaccaagaccatgccgggaactgacggtttgtcatcctttgccgcctgaaattcgcttccactctccacttcataggaagaaagatactgtttgtacgcatcatatctgaaataacggaatacgacatttgcgatcactcccacggcgatgaccgctgccccggcggccacaaccactttccattttatttttcgtttcatagtaaaccccatttctgcccccatttcctatacccgcagcatgatctcattatataagctctctataaacgagatcacctgaccgatcagtgaaaacaaaagcatcaccacaaaaataatgaccagcattgcgataaaagtcagtatcatcgttgcaagcgtttttcccaatgtataattgtgtaccgtcatgataccaaccagcaccaggaacaaaaaccatgcaattccgactgctaagagcagataataaaacgcttcttcatcttctgccaccacctgtgaaaacaggatcgccggaataaatgtaagtatcattggaagcattgcgtaaccgcacaccgtaacgatatccttaaatcttccctcaccgtccatcaggcaggtgatcgaccagtttccgacacaaaacagaaagaacagaagaaataccgcacagatctccgcgagactgttgatctccatcggatttacattgttgaccacaaagcccgcatactgcctgtttgcagaaaagcagactgcaaacagaaagacgaacaggatcgagagtcccacgcttcccctgccgcggtgcctgatctcatagaaaccgtcggacggatgccccagtgtataaaatgcatactttacttttttcttaaacatgagacgccctcctctctttccatttctttttgccgatcttattccagagcaccagcagaatgataagaaccagtgccgcagtcagatatccggttaagttttcctttaagatctcattccggtaacgcttgtatgcaatggaataatactgtctgttatttccggtcttaaagcactccatcgcctttttattttctcctgcggcgagataactttttccgattccgacataggcgagttcaaaattggaatctaattttaaaacttgtttccagcactctacggcgcttgcctcatccccgtcgtagcggagaccgactgcctggttgatcaggaaaccgtaattggttgccctgtatttatccacaagatttttggaaccgtccagtacaatgatctcatccccgatcgtatcgatcgcggtcggcgtatcaaaggtaccctcctgacttccgataccaccaaagatatagagaagattcccttcatgatcgtaggtaaagatccttccccgcgtggagtcgatgaccgaatagattcctttctccctgaccactacatcgatgatgcgggatgctcccgaataatcaccggtaagccgccataaaatatcaccggataccccggcagcacctttctggatcacatcctccccgcttggatttaagcggcgcacggactgttctccctccgcatccacgttcgtcgcatagacgaaaccgtcggagtcgatctccattccggtaaattccgtcggaatgaaaagctgctgttttgcacgctgtgctttcgtggaaagttttctccagatgatctccgctgttgtgatctgtacattgatcgttccggtaaaaccggtgaagtttccttctgcatcaaacgccataatcccttcaaactggttctgtgcaatgacatagatcctgtctgcatagtcaacagctactttaagcggagaaaacacataattttctccaaggatatccgactgcggattctcgatgatctggatcagatttccatttttgtctaactcgaccacgcggtaattaccggtgtccgcaacatacagatatccgttttccgaaatataaactccatttggagaggaaaagttgtcttcctttccgtcatttaaaaacccctcaatcaccgtctttaactgaaaatcagagtctgtcacaacgatccggttgtttccggtatctgcgatatagacatttccatctgcatcggtatttaagtcctgcggactggaaaaatttccacatccaatgacatcccccgttacggtaccgtccggcacatacgccgccggtgtgtatttgatgtcttcataataatcatagttgtacgtttcataaggcacattctccccggcatagacagccgttcctccgatatcggaaagaagtactgcaactgctgccgccgcggcgaatatacactttcgcattcctttttctggcattttcttctccccccattagtccttcataccggatgtggtcatcgtctcgatgacgttactctgacagatgataaagaacgtgatcggtatcgcagcaatgataagctgtaccaccgctcctgcaccctgtcttgccgggcctcctgcgacgatctgatacagtgcgtactggagaggtttcaactgctcactccgcaaaaatccgcttccggtgtttgcccataatgtctgaaactggaagatcgccaatgtcagccatgcaggttttacgtttggcatgataatggaaaagaagatccgaaactccccggctccgtcaagtcttgccgattcgatcagcgaatccgggatctgctccatgaactgcttcatcaggtaaagcccaagtccatatgcaaatgccggtaaaatgactgctaaatatgtattgttgatccccagccaggaaatgatcatatagttcgggatggcagtgacattgtaggaaaacatcaatgataatacgaccatcgagaataaaaatttctttcccggaaaatcatgttttgcaagcggataggctgctaaggatgcaaacagcacatgccctacggttccgagccctgtaatgatcagtgtgtttaacacataccggataaacggcacccaggaacttgacatcagtacatacaggtcgctgaaattatccagtgacgggttccgcacaaagatctgtggaggatagcggaacaattcgtccagcggttttaacgcattgtttaagatcatcacaagcggcagtgccataaacacaccacagatccccatgatcacaaacaggatcgtgttccccgccatggaacggtttaactgtttcgtatgtctgattttccagcgggatggttttttatagtaatctttttttcttttcaaactattcacccacccttctgattgctttttgtacgatctggtttgttccaaccatcagcgcgaataaaacggttgcgattgcgcaggcgtaacccatctcatagcgggtaccgctgccgtaatcgatcagatgtgtgacgatggtcgcaccggagtaattcacactcggatttcccgcaaggttgatggagatatctgccaccgcaaacgactgtgtgatctgcatgacggctccaaacatgagctgtggacgcatggacggaatcgtgatgtaccacaattcctgccagcggtttttgatgccatccatcgcaccagcctcgtaaagactcttgtcgaccgtctgcagacctgcgataaaggtcaaaaatccggttccaagactcagccagagctgtacgataataaggatcggcagcacatatttttctgttttcatccactgaatcggctcgtaaaggaatgaccacttcatcagccagccgtttaagtatccgtaacggtcaccggaaatgatgattgcccataccataaaggcgttaccggaaatcgacggtgcataaaagatcagtgtcaaaaacgcccttaattttcccttaaactcattgatgatccacgcaaacaggaaacacatgatgtaacttaacgggcctgtgatcactgcaaagatgatcgtgtttttgaatgcttttttaaatacatcatcatccaaaagcaatttgatgtaatttctccaaccgacaaaattcggtgtctctaacatgttgaaatcggtaaaactgatcccgatcgaggcaagcacaggcaaaaccgtgaataaaaagaacagtataaaatacggtgcgatcatcacataggacatcctgtattttttcatttccagttttgtctgctgccacttactccttttttgcattttctttgtttctcccatcccaatctccattccctttgtccagcctgcgtttactgcttcgcatcggacgcggttttcataccaaactcctcgcgtttacttgtgatctcggcattgatatattcgagatattcataaagggcttctcttggctgcattctcttatcttcatctgcgactgcaaccgtatagaacgcattgttcacgtttctccaggtaaagtaacttcccggtacctgacggattccctttacgtttgcaaactgtgcctccaacgcctcgtagtcatcggtcggccacggcaggttcgcaaatgcctcaatatttgctgtcggataacgtgctgcctcacccatcagaccttccatctcttctccataggaagtctggatctctgcagaaagccaccacttcatgaactcccaggatgcttccttatctttcgtgccgctcatcatcatacatgcaagtcctgtgcttgcggagatattattgatgcttccatcctcctctttcacgcccggcagtgccgtaaatccccataagcccttgatatccggtgctgatacttcaagtacattgtaagtcgtatagtctgcaatgatgatcggtgattctccggtacggaaacgctgttccacggaggtctcacggtctaatttgtaatctgtgtagaactcacagtaagtcttaaatgcattgaccgcctcatccgaatctaacgcggatgctgtcgcatcttcattgtaaagctcgccgtcgtgctgatataaaagactggtgaaagtcagctccgtcggcaacatgccaagcgacatctgatttttggaaagctcggataacacgactttcatatcatcccaggtctttggtatctcaattccaagttcgtttaaaatatctttccggtaaaacatcatctcaaacgactgtgtctccggcagcgcatacagtgcaccgtcatacataaacggttccaccgcgctctcgcggaaacgtttcactacatcctcataatctggaaactgtgtcagatccacaactgcacttctgagtccgtagttgaccggaagatcattcgaagatgccgtcgttccggtggatgaggttgctaccgttccgtttgttccgtttgccacctgcagtgccacatccggtccctgtccggctaacgtcgcctgcagtaatgtattcatatccacaagctgtacattgacattgatattcgtctccggtgtaaaagtctcatcgatcagtgctttgatgacgttcgcctggtcacgtccgcttccgatccatacagtgatcgtcctgctgtcctcgccttcctccgcaacatttccgatcgcattgtaatctacgataaaggaatagaataatttcttaaactcatgtacgacgcctgctgccacggatccgttttcttccgttaccttctgatccggagaagtgatatagatggcgtctaactgtaatggctgctgctgtgcgttcgtgatccacgttccaagtgcgctgacattcgttttaaatgccttcaccatcttcgtgatcttttccgtatcccgcaggatttcattaagctgatcccgcatggtgataatgacggtctcctcacttccggcaacgcccagtgtatctaaggtgtttaacacctcatcgagttcatcccgaatcactttcagttcgccctcgagttccggaagatgtttctcgatctggtaatcgcggtactcatccggtgacacgccggtgatccggatgatcttgcggtactcgctgtttaactctgtcacaatgctctgcacatcgctgatgactccggcaaaatcgccgagcaccacctgcatacgcaaggtgtggtggcctttgttcagataaaaccggtatggttcccctgatgcatcggagagtgttgtcattttccaggtactgtcataagtaaaaccgtaatggtttaattcctcaaacggtacttccccgtcaatcatgatcttgcgggaaacatagattcctttgacgaagttctgtttcgaatgtaaggtgatattgtaaaagccatccgcatccgcgtcaaattcccattcgatccactgtcccgtcagtctccagctattgccgccgatggagttattttttaactctttcgcactgtacggcgtgatcgccggtgaggactgatcctgtaccggataaagcattctcgacgactttttcgtcgcatattctgcctggatctcaatggactgtccgctggtatctgataccccgtcctttttctgctgttcgtacacggtcttgtaatcaaaaagcgattcctcattctgtaaataaatggaatgaaggatcatcggctctctgcgggaaacgacggtgatctcatgttttccctttgtgaggaaaatggagagcggttccgtcacataaccgtcctgatcgtaaaacctggaaaagagccattccggtgcctccatctgcgtaggctttaaatcatttccctgattgtcttcatcccagatatcggaggtgtttacccacactcttgaaaattcgatcagtgaaagttcccggtacgaaagttcgccgtccacaaaaaaacttctctgaatggaggaaccgtttcccgctaccggatagtaggaaataccaaactcatacatgccttcctccgcaatgtccacctcataggtaagcatcccactctcttccgtgtagacagaggttccttccatcccctcataatcggtaagaacttccggctccatgccctcacatgtcacataatcggctccgttgatctcataagacgtctccggtctttttacattttcaagtccctctttataggcttcatacccctgatattctgccgtataattgagcacttttttataatcctcatacgtctttgcctttgtctctgcgtgaatcgtcacactctgccccacgcaaagccctccggatgtcaaaaccatcactgccgccagtgcacccgaaaacccctgtttcaaaaatcccattctcacggctatccccctcttaatttataacaatatttcttcccctcaaacccttccagctaattttattagtcctattaacttttaagttatcgttaacttaattttaattatatatattgcattattatatgtcaatatttgtgattatttttgtgtaatatgcacatttttcttttctgctttttgtagaagatattttattggattttcacactttgttcacatttacttaattttttattttttaagttattttcgtgccgcttttcgttcaatatccacagaaaccgttgtgtggtaaataagtactattttatattttttctcttatttccgcgtcatattgcgtgttgtctgataactttaggtaaaaaaatttttgtttaccacatgtactttttttcatttgtcgacgcagatttcattatagcagttgtcattttccggatatacggtaattttcagactttattcgcatgtatttttgtgaatttgcgttttttgacatgaatcccaaaaaaagcatgccgcttctaaatttatatagaaccgcatgctttttgcttgcaactataagtcttttcatttacatttttctttattgaaatcaaagagccggtttcgagataactatatttcccatccaaaacaagatgctttattgcctgccttgctttaggaaaaagttgtacttcatcaaaaatgatcaatgactcatgttcatataatgtcactccggtttccgcctgaagtctcaaaaaaacatattcaaatttcctatatcatcaaaacattcccgtatattattcgctgtttttgaaaaatctattaaatatatgatttatattcattttgggcaaaattttccgcgatcgtcgattttccaacccgtctggcaccttcaagcaaaacagcgtatttatctgaataagtctttttccattctaataattcgttatatacttttcttttaaaatacataagtatctcccaaatataagatcacaaaatgtgcatttcttcaaaattttctgtttttatccatacattttttcgatctgtccgggttccatagtctgttccggcacaaaacgctctgacgcggcatactgatacaaactgtagaacagccattttgccgcgatctcatctttatgcaaaagatccggctgacaaaacagtacgcttccattatccactttcgcctcatagatcagtccaagcctgtgattgcgggcaaaattgtcgattacccagacgatcggttcaatgtctgtcccgtctaaaattgcatttttttcctctgttacgatatcccaccactgcggtgtctcatattcctccgtcacaaactccgccagcgccggatgctctgagcggatgtaaagtcccatcgttccaaccggttttggtctgttcatgctctcggagatcgatgcaaacatcgggtagcaccagaaatccgtacagtaggttccgatcattgcataggcatcccggataccggtgccaaaaaataacactttcctgccttctgccaccgcacgctttaactcttcataccgatcggtgatgaccggcagcgtatccgccttctgacgcagtatgttcacaacatcccccagtttagaatggcatttcggaaaggcatagatctcataactgttctctatactgcttccctctatctccacatggacctcataaacctgcggcacaccacactccggaatccgaaatgttccgtcagcgtattcactcagacgcgtctgtgtaaaatgcatccgctctgtctcatttctcatgcgctccccggtcactttattttgcatggtcacaacgattctggcatctttaagttctgtcggattcatgtttgaaaacaggatgcggtaggaaaatttcattccttcttcatacacgaaggatggaaaagaaagcatcagcacacaatccgaacaaaaacttctccaatcgtccgccgtgatcaatcccttattttccataaaagcatttaagataccgaccaatgccgtcccctgtccggtaaaatcctggagatctaagatctgaaaacctgcaagttctctgctcttaaatgccgtctctaactcacgtttataacactgcacagcaagtttcccggacgcctgaaaaaacttctgcgccatatgtaccatgccggcctgctccagccgttccttaaatatctttaaattctccggcacaagcactccggtatatttttcgatttcccggtaatccgggtatgtctcgtactgcccgatctcgtgggatacgaccgggatgtgagggatcaactcttcctttccttctgcctttaccttctttgtccctgttccaaactggatctcgatctccccgacaccactctccatctctgctttctgtgccggacggattttatcatcataactgtattccatttccggtcttttaacctgcacatggccctgcggggcatcacacatggcataggatccacggaacagccgctcttttgaaaaacgtaccccacagaaaaaatcatcattaacaagcacagtcggcacaaactgaaaattatttgatccctgcacataccagtgacgacggtccaccgctttataatcaccgaggatctcatctaacactttcggatttccccacagctcatttcccagtgaaaacaggagaaatgacggatggtttccgtattcccttaagatatcatagccttcctgttttaaaaattcctgtctcgtcttatcatactccggctccccttccgccgcgatcgttccccaaaacggaagttccggctctaaatacattccgacctcatccgctgccacaaatgcagcttccggcggacagcaggtgtggaaccggtagtggttgatcccgtaatcctttgcggtcagaaacaccttttcccaggactgcacatccattggggcatagccagtcagcggaaagatcattccgtcgtgttttccacgcagcagcagaggctgtccattcagataaaaactccgctcatccgttgtgagatcccgaaaaccaatgcagatctttttttcatccgcataagtgccgccggacgtctctccggaaatttccaccctcatttcatagagaaccggcgtgtactcattccagccttccggttcattctgtccttttagatcaaatgtatgtgtgatctcatttgctcccgcagtaagctgtaccggcacgctctcacaaaaccagttcacggattccccttttttgcaaagactgaccgcaagctttgcataaaactgcgatattttatcatccaccgctgcatttacagcgatcttaagctgccgtttcttccaacacgactctgcaaaaacatctttaagccgcacaccgcgatacacccgaagtgaaatttcacctaagatgccgttccagttcgtctgagtatccggggatgtcatatgaccgcccggcgccttataatccacattgctgatcatgacagaaaggtgtcccctgccctgcattaaatatgcagtcagatcatagatatggcttgtgcagaaactctcacggcttcccacaaacacgccatcgatccacacataagattttcttgtgcgctctaattttaaaatgacctgatcccccggctgataatcttttacttccacctctctgccataccacgcatacccctcaaaatgataaggttcggtcagatatcctatctctcttttctctctccgcccacccttttttgcctccgaggtcgttccaggcaatgcgatcgtgtccgaaaaatgtctgttataaaattcctgttccatgccttttttgtccccgtcaaggcaaaattcccacattccgctcaaatctgtttttgatttcattttcccttctccttcattcaactttctgattcgtgtcccccttatggcgtccctgcaaattcctccggctctaacttaagccggattgcccatggcggaaccgccgcatcatcatagtcctctaaaaacaaaaatgccgtctgatagtccggtctcattttcggataagtccccctgccatccgtaaaatacaaaagcccaccaatattttttaactctccgcgctcgatcaggtcattgacgtacgaaaataccggacgaaaatccgtgcttccaccgcccgcaaccgtaaatttctgcatcagtgccgcaatatcccgctcgcttcttaattccacatccgaccggacctgattatcacactggatcacacggatctttgactgcgcaaaaaagctgtttttctgtgtcaggacagaaaatgtctcctttaaaaactgttctaccagtgcaccactcgttgaataactggtgtcgattgcgatcacaaattccctgattttctttacctcacggctctcaagcggctccatcaacggcatatttccatataattttaatccataggtataatagtttaaatcaaattcctcctggttcacgccgatttcttcacgcagcacggaaaaccgctgtaaaaaatccttataacttcttctgctcttttccgctgtcgcctgcgccagaaataaatcttcgccgtccgctgtctcgccgccgcgtaactcctgttccatcttcgtctgccttgcgatcttattccactggttctgatttcttaccgcctgctcctgctttgcctgtccgtcctcttttttcggccagtagcagtggtcatccgtgtaaaattccttttggagcaaaagcttttgtaccggttcttcattctcgattatccggtatatcaccgccgcagaaattcccattttctgctcttttagcctgttatacatctgttttctcgtccagcttaaaatacgtttggtacactctgcctgcatccagtcgatcgtgtattccaccgcaatatcacacgctaaatgccacgttttcctgtcccggttcccgccgatccacagatgggaaaaaatgcagtgaagcaccgtatgcagatacgcacggtccaaatactgcgcatttttctcaaaaattccgatcagccattccggtgccacataaagatatgcaccgtccgtcgcaaatgcccgcagattcggatcggtctttaactgtaactgcgataatgccagtttcaaataccgcagttccatatataattcgtgccgtacaaactccatgatcttcgccgacatctcttcctgccattctgactctgtctgtatatgcgccatttgtgtttctcctttaaattacggtagatcaagatgatgtttaggacaaatatgccattaacaacatcttaacattttttaccataaatcatcaaatgaatagcgttcttttttctgctccgtaaagtatttactctgcaggtgcaaaagttctgctgttccttctgcccactccatccgggaagcctgttctaatccggctttgactgccgcctgcgagatccagccattttcacagaaaaatgcggtcatttccatatttttctgctctacaagtttgggtatgatatataattcctgctcccttaaatgtgccacataacgctccttcgcctcatccgtgagactgaccggataccgtaaccgcaggcttaaaatgtgaagcagcgtgtgctctttttcttctgcacatgcctttggaaaaatcgtatcatacaaacttagatccgggactccctccttaaaacactgccttgcccggaaaccttcgccctcgatactccgcccgaaaatatgcgccggagcgatctcatcatagctctcgtaatattccggataaaagacaaccgtctgccctgtttttccggcaaatgtcacttccatatccgctgaaatccggcttaagatctgttttgccccgctgcgctcccccacatcacagcgcaccgtcagaaagtgaaactttttacagttcataaaggcatcgcttccgatttcttccagatactttccggtcacgagcatctctaaggcagtgcagttataaaatgcatagtttcccactttgcgcatattatccggcagtgtcagcttttttaacctggcaccactaagttccacaaggcgtgtgttccagtccgccccatctgccggtatctcctgccatgttttttcctctgtgtcatagatgcagaccgtgcacccatactctgccggcagatgttcggacaccgcaaagcagtaatctcctgcctccaccaccgcacgtccggctatcatctccggcacaactgcctcctctgactcaccaaacatgcgcaaaatccttatattttcctcactggttttgttccagtaacattgataatatgtctgcatggtactcctcatttctgtactgttcaatgcaattaagattctatgcttccaggcagctgcgtatcgcatcctcatccagctgttccccgatcacaatgatgacttcctgccccattttgatcggcgagatcaccagattctttttggtggcattcatctcgatccactgctctttttcattcttcataaatcccttgatacggaatatttttccgcaggacttgtccaggaacaatttttttgcggcttcctgtaattttttctccgtcaggtgcatattcataaaatagagggactggaatgttttttcctgtgtcagatccggcttgcgatagttttccatgtggtatccgcaggataacaactgcttaaagtcctcatccgtcagcttatcccagtcttttgcaaaaacttcgtcaaactgtctcttacatccaatattgttcagggaacggtttaaatgggaaacggcatttttctgttcctcttctgttgtctcctgtgtcttgctaagaacaacacaccctgcatttgccgcctgcgatgcaagcagaaattctgcgccttccggcaggtcttcttccagatttgaatccaaaactgtgatgacatttccaatctgataccagccgtctaacggctcctcatgaagtgtgtcaaaaaactcgtccacatcgtagatcccggacggctccacgatcacacggtcatatccgcacattcccatggagatcagtttggtcttaaaacgtctccggtgcgtgtcagtatcacagccacccgatatcatctcaagttcacagttatccccccttaaatcaccaagcagcatcatatccacattgactgccccaaaatcattttccaatattccgatattctgcccctgtgcaatcagatgcgaagcatattttcttaaaaatgttgtttttccggaacctaaaaatccggtaatcagatctatttttaccatatttcacattctcctttttcagccgcctgttacgctgttttaaatttccatttttacccacttttcaatgaaaataacctttccatttgtatcacaggtttgtgtgcaggcagagaatcctgtgggacaggattcttatttattctgccgcttcttttcttctgattttagcgcaactgtgtcataccaccaaccaaaattcccttattgtcatgataaatcctctcaacctgtgtcattggcagtggattttctcccatacccgcctcgaccgtataacccggtctgtcatattcctcgataaaccagtctttatatccggcataaccggaggcacttggtgtctcttccaccgcataaccactcacactggcaaaataatctgcgatctcttttgatcttgccggttcataatcaagatatttccagtaaatgacttcaccctgtgtatgatatgcaaggatcagtaaaaaatcattctcttttgtcagctcatatactgccacactctccggtgcggtaagcggtgcctcccccacaaaatccctcggtgccggtttatcatacccctgggaaaatttgatctgctttgccatctcccagcccgccggaaactgcagatttaaatccaccccatcaatgtttgccttccaaccatccggaaatggtattgccggataatcatccgcaatctgccttgccctgcggtaataaataccgctgtttaacaggccattgactaaatccaccccatccgggttcacaagcggcaccatgcagagcctgtattcatcaaataacgtcctcgcatcgacggattcctgccccatgcccgtctgtccactatgttcctcccggacagccgatgaaaaaacaatgtttccacctgccgcataagctgctgcatactcctccacaaatgttaagagcaccggcgttgtaatgctctcattggcatgataagatgcgctgtaaaatacctgcttctcaccggttccgatccaaagactgtgaatatcctttcccatcacactttttcctatgacaccagccgacaaaaacggatagcgcaccacaagcccgtctatgatccactgtgttaagaccgacgtatattttaccatctgcggaaccaacggaaatccgagcggaaccgctaaaatggcatcaacaaccagatcatccggatcaatcagcggatttgccgtaaggattgcctcctccgttgtcccatatctgcgcgatagtccaaaaaccgtatctcctttttcaatcgtgtgcatacggtatccggtcagatatgggtttaatttctcccatacctcgcgatttactgtacatacatccgtatttccggtaaaattcttcaatgcctgacaggtgcgttccccaaaaatgccgtcaatcctggtcggatgtcccgctctggtgagtgcaagctgtaaatattccacccacacaccgcggtccccctgtatcaaaaattgcataaattcccctttgtagcattctttccactattatatgcacctttccggaaagattttcttttttctattttacaaaagcgatattatctaagtttactgcaccgttttccagtctgtcaaacacaaaccggatacttttgatctgttccttatcaaatccgttttcgtctgcaaactgatctgccgtgatatgtaccgtctgaagctgccttttatattcatttttcccggtaaggtactgaatctttgaaagttttaccgggaatgccggataaaggattacagaatcactcacggaactgactgcacaatttccatagatatctgtcagcaccacagaaaaatccatcggctcactctctgcttcttcccttaaatccatggcatcaaaacagattccgccctctcccatcgccatcggctcgtccaatgcgatctcataatatgctgcttctgtttccttccatttcagccgcaccgcatgattttctctttttcccatcgcgaattcggaatatgctaattcttcctctgtccacatcgtaaaatgttccgcagatatactgcctcccggcgcagtctctaaatcagagtcctcctcatagtcggtaataaacgaaatatccgaagtctcatattgctgtacataaagtgtttttggcagatatgcggcatactttgcataatctgtcaggaaatctgcataggtgtcatttcctttcaaactcttatctaaaaaaacaagtgaagcaatttttaagatttcctgctgttcttctgccgtaataaaattctttacattcagccacagggaaaacggtcttccgatatcatactctccccattccgtattgaattgtccgtgattcgcaccggcgatatagagcgaggatgcaatgtaatacccgtcttttgaaaatgaaacattctcatactgctcattcccaaggaaaacgctgatatcctggtcattcgctccctgcagcaccagataatcgatatccgaaagttccgtctcatgtcccgccggcagatactggttgactgacggtgccaccgcgatgagcgcccggatcttgtaatgataatcaaacgtaaacatgccattgctcggatatgcatcatactcattgaaaagatatgcatccgcgatcatctcaccgcccctcgaatgccccatcaatgcaatattctgttcatcgagcttaccatagattggctgtgaatcatccccatttttctttaaaatctccccgatattttccagaagaagaaccgcacgcgcatcattttccccacttctctcgtttaaaatattttcatccacagacacaaacacatagccatgtgatgccagatattctccaagataatcatatcccagatacgactctgccgtaatgctgtggttgccgtgcgccataaacacaaccggacagttttctgcttctttgggaaaccagattttccccgcgaccggcgcatcttttctggtgtgtttcgtaaaaaaactccggtagattctatgccactttttctcttttgccacatatggacttagatccactgtgcctgttgtcatatctgttccaccatccggaccataggtcacacaggcaggcgtatattctcctttcgcacagtaatccgcaaatccagccacttcatccgcctgtgtcacataaatgttgttctttagataatccgaaatataatcatccaaaaatccctgtccaaacaaaaatgccagaaacacacaccatataacacagccgagtacaaaatggattccgccaatcagtgtatgccgccgttttaccagccatgcccagataaatcttcccgctaacagcaataaaatataaaggaatgtagaaaaaaaagtgctgaccatatgttcattgccaacacttccatatacacaacagcagacaaatatcaaaaatcccacaatcccatacagaatatttccgatattgcgatgccagatgcggtcaccaaaacgcgaaagcagacatactgccaccatgagcagcatatcacctaagaacactcctccagcaaaaaaaatcagtttcgtcccaaaatattcggatgccagtgcaccgcagaaaaatcctgtgatcaccagcaccaccaatttcattccccatccggtatctttcagattcaaccggcatgccctgccatattcacgcagtctgccgcataaaaattttctcatctgtcaattatccctgcttacttttttctccgctttttcctcatacatcagcttctctgcctgttttatatagctgccaagcacattttcctctccaggctgcgcgacaacggcaccaatactggcacttaattgaaacggcagctgcattttttcctgtacttcacttaattctgccctgatcttttgtgctaacagtctgcctgtcatctcatcttttgccccctctagcacaataaattcatcaccgccggtccgcgctgcaatcgcatccgcagcacaatattttaacattgcttttgcaatagaaacgattgcaaaatcaccatattcatgtccataggtatcattaatatatttcaggcggtctaagtcaataaacattaccaataccggtacttttttctctttcataatagaaaaatagcttaccgacagcttctggtatcccatgcggttatataatcctgtcatggaatctttgacataaagatctgacagaacctggttcatgtattctaacttttcttttttatggagattttccatcgcatttgtcagtgtctttaccacctggaacagatactgtttttccatcagataaactgcattttcaatgacaaaatatccaaccgtacggtttctgaaatgcatcggaagaaataaaaaatctgttccacccttgtgcggttcaaaaaaaggaaaaataccttcaatctccatccggtctgtatctaacattctgccatttttatatgcaaactttacctgcatacatttcggatacccctctacatgaaaatcgtcctcatcaaaaaaactaagactccggtgtaattttacctgttccttatatacatccatatgtgaatcaaggatcagatacattgcgtcacattttaaagacggaatacattgtggtatacagtacatcatctcacgcaccgtattacatttgagcagctcatattctaaagaaaacacctcatcctcaaactttgctgtctcaattccatacatgatctgtcccttaagataagccgactgatctggcacctctgccgccgtacacccacagctgtcccagaaaacaccttctgtatctgtataataaaaccgatccggtttttcccctttccagatacgcaggaataaatctgcacatgcaacccccacattttcccggatatgactgatcgtcgagatcctcggcacataatatgccgctttatcaaaattgtcaaaaccggtcacgcagaaatctttcggaacctgatatccatgtgccgctgccgcctcacatacgccaaccgcaatattgtcattcgcacagatgactgcctgcggcagtgcatcatgtgtttctaacagtttttcaaatccattgacaccgcactgatattcaaagctctcgcagtaaaaatccgactctgaatatataagctgcttttcatccatgaatgcttttaatgcagccattctttttacattctcataattatcctccggtcccatcacaaaccagtattttttacacccatgtttctcataaagatgttcgatcatcacccgcattgctttttcgttgttgatcccgacataataaaaatcttcgatctcttttgcaatggaaatgaccggtacgccggactcttttgcgcgccgtatcacatcttcccgcacctccggatagccaatgttattgagatcaagaataatcccatcaaactcgcgcagatttggaagcctgtatatattatactcaccggtattatactcctcatcacagctccatccgcccgaactgttaaagatgtacagactcacttcctcgccggtctgtctgattctctgaagaattcctgccggccatgcaaaagtaaaccaccttttccagccatccataatcagtgcaattttcttcatgattctctcctgtccaccttaatccctgcaaaattactatattgaacgaaaaacccccggaaacaaaatgcttccggggtcttctatgacaaatcagcacccgtacccattaaactctggataagtactcacctgttcttgtatcaatcttgatcacatcatcctgctcaacaaataacggaacagatacagttgcaccagtctcaacaactgccggctttgtagcacctgttgctgtatcacctttgaaacctggctctgtctctgtaattcttaactctacgaacagaggtggctctactgcgaatacgcttccgttgtgagagcacatttttaccatctcgttctcttttacgaattttaaggcatcaccgatatcatctttggataaagcgatctgatcatatgtctcaacatccataaagtagaataaatctccatctgcatacagatactgataatcttttctatcaatacgtgcctgtgggcatttctctgtaggacggaatgttttctcaacaacaccgccactcttaatattttttaacttagttctaacaaacgctgcacctttacctggtttaacgtgctggaattcaataatctggtaaatgttaccctctaactcgatggtaataccatttctgaaatctcctgctgaaatcatgtaacttcctccttaaacatacgcccgagttttggactctctgatttttctattttataataaatgcctgtacatttcaagctttttttcgttttgcaccatcaaattgacaaaaacatggttatttatgagtttcgttcttctatctcatggatcagatcaatcctcgtctgatgtcttccacctaaaaactctgcatctaaatatgcttttacgatatcttttgccagctcggttccgacaattcttgcaccaaatgcaataatattcgcattattatgctccttgacaagtcttgcagttgcgcagtcagaacacactgccgcacggactccctttactttatttgcagcgattgagataccgactccggttccacagatcagcactccacagtctgcctcccctgccacaacggcacgtccgactttttcaccatactccggatagttacagctgtctgacgtatctgttccaaaattaatgacttcatgtcccaattctttcagataatccatgatgacaaattttaattctgttgctgcatgatcatttccaatagcgattttcattgtattcctcatttctttctattttatttgctcttaaatgagcattttattcatgacaatcggtttgcccaaagtatgccgtctattgtttttctttgtttttctttgccagatctcttctgtaaaaatacagcacgatcttttccagatatctttttaatacaatctgtatctcctctttcggatgaatcggttttaccagaatcgagcggataccggcacgcttcgcaccatatatatccgtaaatatctgatctccgacaaatatggtattgccggtatctgtccccagctcctccatcgcctttttataatttgccggattcggtttgcccgccttatagatgtaagaaacattgaccgcatcattaaacattttcacacgcggttccttgttgtttgacaacagcatacacgcaaatcccagttcttttaaatgtgcaaacagtgcacatgcacgctcatccgccggtgctccatgccgcaccagtgtgttgtctatatcaaaaatcacaccgcgatacccctgtgcatacaattcatcaaaatctatctcgtaggtcgaatccagatactcatccggatagaacttttccatcatattttcttatcctcattttcatacaaatttgggtttgtatgtatatttttatttgcctgcaaatttggtctgcatacatattttttcatgtaaattttcatacaaagtacagtgtactatactttcaaaaaaatatccagtaaaaaagagaatcacccacaggcaatcccctttccatcatcaatgttctgtttacaatgagaaattctcattcggacgaatatataataatccggtctggctcatacgctctccaacaaaaaactgatactgctgtaacacctgatccttcttcatatcggagatagctttctcaacatccagactcgtaatatcgctcgcgattcctttcagatcatactctgcatccggctgatattgtttcgcatactctgtggcaccatgatccggcttgttatccctctcactctctgtaacctcagccacacgggtatcttcccccgccgtatctatggcatttggtacactttcctcctgaatctgagtattctttatggtattgtaatcataaaaccccgcctgtatacggatacctgaaatattcataccacccaatcccatccatctgcatcttctacttgacaaaaactatatcggtctgcctttgtaaatactttagcatatttttagcgttccgttacttgtctaacatctttttcaattcgctcataaatgtattcacatctttaaactcacgatataccgaagcaaaccttacatatgcaactgcctcgagatctttcagcttatccatcacaagttctccgatcagactgctcgggatctccttctcctcacgattaaatatttccgtctcaacctcatcgactaactgattgatctgattgacagaaattggtctcttatgacatgcccgcagtacccctgcttcaattttggaacggtcatactgctccctgttattgtcctttttaatcacgataagcggtatcgtttcaaccttctcatatgttgtgaagcgcttcccacattcatcgcataaccgtctgcggcgaatcgaattgttatcgtctgccggtcttgaatcaatgactctcgtattctcactgctgcaaaacggacacttcataagctacctcctatgcacagaccccatttattaaaagtatatccattgtttttgtaattgtcaacataattttccctgttatgtccacctgtttttggttatttcaacgaaaagtttcgaaatattttcgttttactgtattttcttacgaacttctttttcttctatatcaaccaatatgatatccggtccgatttttacgattttgcaccatggaatatgcagttcaaattctcttcccacacatccaaaaaactttgccggtccaggaacaataatcgtccggatacatccgtcatgctcatcaaactccagatcacagacatttccaagacacttgcagtcacagacattgatcacttcttttttctgaaattcacaaaaacgcatatagtcttccaaatccgttcatttagaaaaccatatgcgtcccggtatatttttagactattttttatacattaaagcggaataagattacatctccgtctttgaccacataatcctttccttccattccgacgattcctttttcacgcgctgcggaaagacttccattatctaatagatcctgatagtttacaacctcagccttgataaatccacgttcaaaatccgtgtggatctttcctgctgcctgtggagcttttgtgccttttttgatcgtccatgcacggcactcatcttccccggcagtgaggaaggatatcagtccaagaagtgaatagcttgcagctacaagcttgtcaagtccgcttgactcaacaccgagatcctcaagatattcttttttctcatcctcatcaagctctgcaagttcctgctctatctgcgcacagattacgaatacttctgcgccttcttctttcgccatctctctgactttcgcaacgtgcggattcgatgctccgtcatctgcaagatcatcctctgccacgtttgccgcatagatcgtaggttttgctgtaagaaggttgtatcccttaaaccagatctgtgcatcatcatcatccggtacttcaaacgttcttgccatcttgccatcttcaagatgcttctttactgcctctacaagttcaagctctttcgcaagcgtcttatccattcttgcctgctttgcaatttttgagattcttctgtcaaggatttcaatatcagagaaaatgagttcaagattgattgtctcaatatctcttgccgggtcaatggaaccatctacatggataatgtttgtatcctcaaaacagcgtactacatgaacaattgcatctacttcacgaatgtttgcaaggaactggtttcccaatccttcccccttacttgcaccctttacaagtcctgcaatatcaacaaattcaatcgttgctggtgtaacttttttcgtgtggtagagttcaccaagctttacaattctctcatccggcacggatacaattcccacattcggatcgatcgtagcgaatggataattcgccgaaagtgcgcctgccttcgtaagtgaattaaataatgtagactttccgacatttgggagtccgacgattccaagtttcattttattttccttctttcttatttttctagtgtttcaaggacttttcatgtggttgtcccccatcttgtcccccattttatatatttcatttatgacctttcatgaacttatgcaaaaaccattctatccatataattggaaaacttatctatctcggttttcactgtttcttcggtcaagtgactatataaatctaatgtgatttttattgagctatgtcccatcatttgtgatagcattttgtaactctttgcatactctcctgatgcactttccagaaatcgtgttgcaaatggttctatttcttttttagttttgggtagtttccatttctaaccgtattaggtctcttgttgttttctttaaatccattccattgtttggcttcttttacattatcaaatatcctgtctactctttttccactagccgttataaaacatgctctatatttaccatctttttttcgttggcttagatttagacctaaatctcttttaaatcaactcccatattcttatttgctcccttcattaaa

SEQ ID NO: 5172 - DNA, 1205 bp, Unknown
  gut microbiota DNA sequence
ggtgaagttggtgtgataacgatattgatggtgattttgctgggacctaccgtggatttggtcggacgaataatgaaaacaggaaggggagtggagaaacagggagtataaataaaaggagttgcttgtaagtgctattggtatatgaaaacagaaatacaggagtatccgcggagtggaagaagccagtacatgtgccgccgcatctacatgaggcaatagaagtagtgtatgtaacggatggagaaatagaacttggagtgggacaggaattgttccatatggatgaaggggattttgcagttgtgtttccaaatgtaatacatcattatcaggtgtttggggaaaaagaaaacaaggtaatattcctgtaccttgaaccaacactgtttccttcctattacagggaattgcagatatacagcccaaagaatccggttgtgaaaaaagagcaggtgcatccggatgtggtaaatgccataaaatatctgaccggaataacagagggggatccccggatgatacaggcatatgcacagatgatccttgcacatgttttcacaacaatgccaatgatggataaaagtgcggtagggagtgatgacctgatttataatgcggtagaatacgtggccaaaaattttagggaaaacatcagccttgaaaaaatggcatatgaattgtgtgtaagtaaatatgtgttgtcaagaatgtttgcaaaaatctttcactgtaattttagtaaatatgtaaatggagtccggttaaattatgcagttgcggcactggaaaacacaatggattccattacaaatatatgtcttgattgtggatttgaaagtcaaagaacttttaaccgcgtgtttaaggaaagatataaaatcacacctagagaatatcgaaaaagtataattgcgtaaagcggtgtaatactgccggtattggggcggtgatgacaataatagttatgaatggcatccggaattagaaaaagttgtggtgtttcctgagaaagagaaaacttgtcataacagccgaaaatagatataatagttacacatgtgggataccacaatgaacgaaaaaggcgaggaaacaatcatggcatttgcacatctgcacacccatacggaatattcattactcgatggttccaacaaaataaaagaatatgtaagccgtgtgaaagaactggggatgaacag

SEQ ID NO: 5173 - DNA, 71838 bp, Unknown
  gut microbiota DNA sequence
tttttttgaagtttttttatttttttaaaaatatgaacaatttacacaatttcattctgcttttcccaccattttcatggcatttttacctctttttcatacatcagatcctctattacttcacgcaccgtcgaaatccgatctatttttccaacattcgaaccgcaaaatacaagtccgttttcaacgtctccatgcacagcacggatcaacgcctgtgtgatgcagtacggaatctgcgccggtttacagtttttaacgcagtgataacagcgttccacgctctccggcgcccgttctgtcttttggataaaagcattgtttaacgcacgccccggcatgccgaccggacttttgatgatttttacatcagtttcttttgcattcacatatgcttttttatatcctaaggaagcatcacactcttttgtcgcaacaaatcttgtcgctgcctgaactccgtctgctccgagtgcttcgatccgctttgcatcggatgcatcccagatcccgcctgctgcaaaaacaggtatctgctttccatacttctcctcgtactttttcttttcctccatgacccccgtaagctcttcctcaaaatggatctttgaaatatcatctaactgctccctcgaaaatccaagatgtccgcccgcctccggcccctctgtgacaataaagtctgctgtcctgccgtattttttatcccaggtttttaaaagcagcgccgccgcgcgccttgacgatacgatcggtgcaatctttgcttttcctgcttctaccagctccggcagatccactggaagcccggctccgcagattaccgcatccgccccggcacgcaccgcctctttaacatgctccctgtattgctgtaatgccaccatgacgttgactgctatcattccttttccagatgccagttcttttgcacgcacgatatgctttcggatactgcgcagattgcacgcttcttcatttcccacaaaatccggttcctcaaatccgatctgtgccgtggagatcacgcccatgcctccctccgatgcaaccgcgccagccaggccgcttaaactcacaccaactcccatgccgccctggatcagcggcagactcagattccatccttcaaaacgattcattgaaaaaattttcttcattgactttccctctattatatatagtttttattactatatataatggtatcattcaatatataatatgtcaacaataaccatattattatttgtaaagaaaaacgactgtaaattttttacgtttacagtcgttttccgtgtttttatcatttataaattatttattcctgcgcaaagacatcgacctcttctatcgtaagtcctacaccgtctgcaatctcttcttttgacaactttccctgtttcagctatgcagatcaatcgtcatatccgttcggattgttcttctgccatctccaggaatcttcgcacatctctttgataccatactgtgccttccagccaagctcacgctctgccttcgaaggatcacagtaacaggttgcaatatcacctgcacgtctcggtttgatggaataaggaatcttcacgccggttgcagcttcgaagtttttgacaatgtcaagcacactgtaaccatgacctgttccaaggttatagattgcaagtccgcatttctcatcgatcttctttaatgcttttacatgaccgagcgcaaggtcaactacatgaatgtaatctctgacacctgttccgtccggcgtgtcataatcgtcaccaaatacgccaagttcttttaatttgccgaccgccacctgtgtaatgtatggcatcaggttgttcgggatgccgttcgggttctctcccatggttccactcttatgagcaccgatcgggttaaagtaacggagcaagatcacgttccactccggatctgctttctggatatccatcagtacctgctctaacatggattttgtccatccataaggattggtgcactgacccttcgggcagttctctgtgatcgggatttctgccggatcaccgtatacggttgctgaagatgagaaaataatgttcttgcagttatgctgacgcattacatccaccagagtcaatgttcctgaaatattgttgttgtaatattcccaaggtttctgcacagactcaccaacagcctttaatcctgcgaaatggatacagctatcaattttttccttttcaaaaatctcatttaaaattgtgcggtctaagatatcgcctttataaaaagtcacttcttttcctgtgattgcttttacacgctctaatgatttttcagatgcgtttaccagattgtcaagtacaacaacctcataacccgcatttaacagttctacgcatgtgtgacttccaatgaatccggcaccgccggtaactaaaattgccatagttttttccacctttccataacaaatctttttgttttccttcaacgttatgggtacatcttaccccattctttggaaaatgtatagcaaaaaatgtgtatattatatgtaaaaatgttgcatgttgactgagtggccggtataattatttagtgcagaaccgtggggttgtggccgtcaggccgtgtgaagctgctggcaatggattaccagagaataatggaggattaccatgtacgaaaaatataaaaattcttacaaagtaacagagaaagaactggtttcactttccgtctataacgtgggatttcagagatgtgactcgctttatcagtggggaccgggaatccgggatcattatctgatccattatattatttcggggaaaggtttttacaagattggaaaaaggacttatgaattacaggctggggattcttttttggtgtatccaaatacagaagttgtctattacgctgcagagactgacccgtgggagtatgcatgggtgggttttacgggcagtgacgcttccatgatcttaaaggcaacggatttttcgccggaaaaaccgatcatacgggagacaccgcacggaagtgatatccaccgccagatactccatatttacgatgccagaggaaatgaatttgagcatgccgtggaaatgaccggacggctctatacgatgcttgccatgtttttacacggcgcttcccatacgacggagcaaaattccgccaacagttatgtgcagaaaggcatcgagtatatctcttccaattattcttatgcaattactgtggaggatatcgcagactatgtcggcgtcagccgcagccacctgttccgttcttttgaatcggtgcttggtcagtcgccaaaggaatatctgactgattttcgcatgaaacaggcgtgttatctgttagaacattccagcctgtccatcaccgcgattgcaaattcactgggttttgacaacagcttatatttttccaaaacgtttcacaaacaaaaacaaatgtccccaaaagaataccggacacattcccgtacttcctaaccataaaactcactgccgttccagtatgcttttgcctccccggcaagcactgccctgcaaaaatctttttcatcggagagcttccggtcaaacagcatgccgccaccgatcattctgatggtatgctgatccgagccagccgtaatcggaagtccatgttctttcgcataggcgattgctttttcattatacaggatatttttatgcgacatgctcgcagggctctcatgtgtagcattgattccctccactgcatctacacagtccgggaaaaggcggatttccggaatataatcctcctcacgaaacggatgcgcgtggctgacgataccaccaccggcatgtaccagttcatactgttctttcacatctgcgtctttgatctcgggatgttcaaacagccattctttgtttaagccataaattaaaaattctgttccgtgatatcctgactcccatccgaaaaacacctgcagtccgatcttatcgccttcttctttcgtatgttcatagcccttccagaactgttctacccagtctttccatggaaggctccggtccaccgccgtatttccataaaagaaatgatctgttacgacgatgccggcatatcccgctttctgatatgctctcgccatctctgctcctgtattctgtccacatgcgcttccctctgatgtgtgcacatgggtgtcatataaatatccgtttatttgcatgataaaccaccaatttacctttcataagcgaaaaaagaacttaccccggggttgtcccaccggaataagttctccctcatcttgtcctataattaagcaactgctttctttgcgatctcagctaatgctgcaaatcctgctgcatcgtttacagccatctctgctaacattttgcggttgatgtcaacaccagctacttttaagccatgcatcatctggctgtaagagattccgttcattcttgctgctgcattgatacgagcgatccataactgacggaactgtctctttctctcttttcttcctgcgtaagaacttgttaaggctctcataacagactgttttgcaacacggtactgtttagaacgagctcctctgtaaccttttgctaattttaatgttctattatgtctttttttagcgcctaaaccgcctttaactcttgccatgatctattcctccttaacaactttcttacatgtatggtaaaatcttcttcatattcttaacgtttgtagcatctacgatagccggttttctaagatttctcttattctttgttgttttctttgttaagatatgtctcttgtaagctttatttctctttaattttcctgttcctgttactttgaaacgttttgcagctgctctgcttgttttcatttttggcatgatatattcctccttaaaattatgattttttttctgccaacaccatgctgatgcttctgccttcaacctttggtgctttttccactactgcaacctctgcaagactctcagcaaagtcatccagaatatgcttgctggcattcatatgtgccatctcacgtccacggaatcttaaagtgatttttaccttatcacctttgcttaagaatttttttgcagcattcattttggtgttcaaatcatttgaatcaatattcggtgacaggcgaatctcttttaactcgaccactttctgtttttttctggcttctttctcttttctcgccaattcataacgatacttaccgtaatcgataatcttacataccggcggctttgcggtcggagcaatcttgaccaaatcaagctctgcttcctcagccagcttcattgcttctctcactgacataatgccaagctgttctccgttttctccgatcagacgaacttctctgtctctgatctgttcattaatcattaactcgctaatggtattgcacctccaaaatattattctttacttgcattaaaaaaagtggataggcagactatccacttttaatactcaatactcgcaaggtgcgatacttcaaacaacaggaatattcccgatgccttgaatataaaaccatgagtcacacgaatgctggtgctccggtgagagtggatactctactttgttttcaacaactattaaactataccacttcagaaaatttctgtcaagtactttttaaagtttaagaatgtcccctgctaagacattcttaaactttctatcctgatattaattattcctgtggaagaatgtatttactgatcagttcatctaaggatactgcctgagcagaaagctcctcactggtagcagaggactcctgtgcggttgcagagtttgcctgaacaacctccgaaatctggttgacgccctgctctgcctgatccatggcagttgcctgatctctggatacctggctgatatttttggaagactctgcaatcttgtcgattccttctacaaccgtttcaatggatgctgcagctttgtctgccgccttgtttccttctgcgatctcctctaaggatccttcgatcagttctctggtatctactgcagattttgtactctgctctgctaactgacggatctggtcagcaacaaccgcgaatcctcttcctgcctctcctgctcttgctgcctcaatggaagcatttaaggaaagcaggtttgtctgggatgcaatatcctcaatctcagaaatgatgttctcgatatttttggatgtctcgttgatgcgtgtcattgcatctaccattgctgtcatctgcgcacggctgttgtcagcttcgtctgcatactgttttgcctgtacataggactcatgtgcctgatctgcagctttttcaatgttctctgtgatgcttgtgatcgtagcctgtaactcttctactgcacctgcctgctcagtagcaccctctgcaagactctgtgatgcctctgcaaggtttgtagatcctgcagatacctggctggatgcatcttcaatagaacgtaatgtaacgatcatctgattcttcatatcacgcatggcaagaagtaatttttcaaattcaccctgatatacttccggacagtctgatttgatatcaaagttaccgcttgccatatcagcaagatgtttgccacagtcagcgataactatatttaatgtttctttcatctcatttgctgtctggattatgtcagccacctcatcatgcgtatctactaccgggaatggatctgtgaggttaccttttgcaaatgttgtaaaacggtcgcttaacgcaccaagaggtactgcgattccttttgcaatggaatttcccattctcattgcctgtgcaaatgtaaatacaatacttgcagcaatcacaataaggaaaataatactaatggcagaaagtcttgccgcaagggagtctccttcgtttacgtttgcatccagcaagtccgctgtaaggctgtaaacctgctcatacaatggatctacagtatcgttcatcatttgctgggctttgatgctgtcttcattgtccgtggaagcgccgatctccatcgcttgggcttctgcatcccagtactgctgaacaagtgtgttcacctgctcatagagatctttctcagtgcctgtcacacaggtgttcgcaactatagcccagtaatcatcaaacttctgtttcttttcatcatgtatctgtttcatggttgcgatcatatcagtatcattgtaaccaatcacaccgcgcgctgctgatctcgcatctgcaaaaacgatcattgcctttccgatatcaccctgcgaaaaaccataattagtaagtgcatgtttatactgcgtagatataataagcatcataattgctccaataacacctgcaatggatgcaagcagtgtaacgactgtgaaacattttttcagccgttcctgaatttttagattcttatacataaccttttcctcctgtttgtgcgctttatttactatgtctgtcaggtattgtcatcgataagctgctttatcccctgctgctcggactgtggcatcagctttgaaacctcaaacatcacgatcagctgcttatcataggatgccacatcattaaagcagctctgattggcattcatgatcgtcggcatcggaatcacctgtttttcatttacatcaatgatctcacggacactctctacttcaagaccaatcttcatgccattcatacttgccacaataacattttttatatcctgttttggatatccgaaatagtcagcaagattacatatcggaacgatatcaccatgcagattcacgattccttcgatatgcgcaggtgcatttggaacacctaccacactcattctggtttcaatcgactcgacatcatccactggtattccaaaacggacattattgagcataaacgtcagtaattgcattctctcaccttctttgctgtatttttgcctctaaaaagccatcttgtgattattgtaccattttagtaaaatatgtaaactatttttttatactttttttaattttttgacaaatatatttcattcatgctacgataacaccatctgctgactgtttttacagtcacctattaataatatgaaaggacttacagactatggataatagaattgttgacctgcatgtacattccacagaatcagatggaacctttacccccactgaggtgatcgcagaagccaaaaaagccggtctttccgctatcgccctgactgaccatgataccgccacaggtataagaaaagctatgggtgccgcaaaggaagccggtatcgagctgatcccgggcattgagctttccactgcttacacgtttccgggaaaaaaacaggaaaaggaaatccacatcgtcggtctctacattaacccggatgacccggaactcttaaaaatgactgctgaattccgcgaatgccgggataaacgcaatgaaaaaatgatcgctgccctgcaggaagaaggatttccaattacgatggaagcccttctggcagagaatacggacagtgtcattacgcgtgcaaacatcgcacgtttcctttatgaacatggatggatcaaatccgtttccgaagccttcgacaaatacatcggcgatggctgccgctgctatgtcggacgttttaaagtatctcccatggaagccgtttcccttatcaaaagaaccggagggattgccatccttgcacacccgctgctttatcatctgggtgtagaacagctgcagttgctgattgacgacttaaaagctgtgggacttgatggcatcgaggcaatctactctacctataccaccggggaagaacagcttgtcaaacgcattgcaaaagaaaacaaactgctcatcagcggcggttctgatttccatggtgaaaacaaacctgccataaagcttggaaccggacgtgggcatctttatattccatattctgtcctgaccgatatcaaagcgcgcgccgggaagtaacaccatttcacggattgcaaaaaatgtctgtcctataaaataaatttctcgatcacctcggcaatggcgtcatgattattgtcatttactgtgacataatccgctgccgcctttgctttttcggtggcattcttcactgcgaccccgatacaggccgtctttatcatcggcacatcattatcctcatccccgactgcaaccgtcgcatccatcggcatattaaggatctttgtcagttctaaaataccagttgccttgcttgtatttttcggactgtactctaaatactgactgctggaaaaaaagctgttacattttcccttttcccagttcagatttttcttttgaaaacgttctaacttgtctctctgatctaatgagatcagcataaccttctgtggttcttcctctaaagcatccaggatatttggtgatatcttataagaaatacgcgcctgtttcacatagtaatccagttctttcgtatgctttgtggtaataagatccgtgctgttatatgtctgcacatacaggcccgcacgttttgccttatcaaaaagttcctgcacaatctcaatcggcagcgaacgctttaacagtacacggtctgctgcgcagtcataaagtactgcgccattaaatgcgatcatatagcagcccggtgtgtttaaccccagttctcttgcaacttctcttgctgtttcaaccggtcttccggttgcaagtgctatgtaatgccccgcctctaacattctgtggatagcctcacggtttttttgcgtgatgcttttatcatcacacaataatgtggcatccagatccacacataaaattttgtgattcataaacctctccccttcttatcggtaaaatactgctattctgcaggttccgccggaataaatacccgttcccggtacacatgatcctgtttcggaactgctgcaaccgcttcctcacagaactgcatctgtgaattgactaaaacttttcctcttttatcaattttctcataatttccatctgatttcaagagatgagcctttgtattatcagataattcaacttcgagaatgtgttttgcagatttttttgcctcatcatccagaacagggaacaatatttcaacacggcggtccaagttacgcggcatccagtccgcacttcccatatacacctcgtctgccccgttattctcaaaccagaaaattctgctgtgctctaaaaaatttccgacaatcgagcgcacttctatattttcactcacacccttgatgccaacctttaagcaacagataccacgcacgatcagctgaatttttacccctgctgccgatgcctcataaagtgccgcaatgatccccgggtcacagagcgaattcattttcgcgacaatgcgtgccggctgtccgcatttcgcatgtgctgtctctctgccgatcagtttcataaatttattacgaagccagatcggtgccagggaaagttcattccaggaaagcggctcggaataaccggacagcatgttaaataccgctgtcgcatcttcgccgatcgcctcgttacaggtaaaaattccacagtcagtatataattttgccgtcgaatcgttatagtttccggttccaagatgaacgtatctgcggataccgtcctcctccctgcggacaacaagcgcaatcttactgtgcgttttcagacccaccagtccatagataacatggcagcctgcctgctcaagtttttttgcccagacgatgttattctcctcatcaaaacgtgcttttaactccactaaaaccgatacctgtttaccattttccgctgcctgtgccaaagatgcaatgatcggcgaattgccgctgacacggtaaagtgtctgtttgattgcaaggacatccgggtctgatgccgcctgacggataaaatcaacgaccggatcaaaggtctgataaggatgatgtaagaagatatcgcccttccggatcaattcaaagatattttctcccggttcgatctttggatttttctgcggcgtatacggtttatagcgcagatgatcacagccgggaagtccatacattttcatcagaaatgtcagatcgatcggcccctggatacagaagatatcttcttctgcaactttcagttcatcctttaagaaacgcagcaggcgtttgtcaattccactctccacctcaagacggatcacttctccccactgtctcatttttaactgtttctgtatctcttttaacagatcctccgcctcgtcctcatcgatcgtcagatcggcattccgcatgatacggtacggataagcacagagcacttcataatttaaaaacagtttgtcaatatttttctcgatgatctgctctaacagaataaaacattttgcattttcttcctctgacgggatctgtaccagtctcggaaggacccccggaacctgtaccgttgcaaaatccagttcctgtttttcgctctttgtattctttttagaaagaagtgccgcaatatttaacgtcttattgcggatcagcggaaacggacgcgatgcatctaccgccatcggtgtcagtaccggatagacattttcctcaaaataacggtccacaaactttttctgttcctcagtcagatcttcaaacgcatctataatatggatctgttctttcttaagtaacggaagcagcgacctgttataagtgttgtactgcagatctaccatctcccttgttttttcgttgatggcagcaagctgttctgaagccgtcattccggcaatgtctttcttcttatagttagcatgtaccatatcttttaaggaagcaacacgcaccatgtaaaattcatccagatttgaggaagtgatactgacaaatttcaggcgttccaaaagcgggatactcttatcgcgtgcttcatttaatacgcggttatcaaattttaaccagcttaattctctgttttcgtaatactgtggatttttaaaatctttttctttttccatagtgtcctccatttaatacacacgtttctcctttaccaccggttttatgctgaatatgttttcaaagtaagaaaccttcgcatcaaacagtgctttttccagtgcgatatcatcatctgtctcgattgtgatcaccagttcttttccttttactgctgcacgcacatttttgaatttctgcttatggctgcggtccatcgcattggatacgcgtaaaattgcagaaagttttgcaatgacaacataactctcacggctgatatcactctcaaaatcttcataggccggcagcggataggtattgtataaaaccgtatacgccacgatctcacgttccatatgtgtaagaccgatgatttccgacgccataataatgtcataggaacacagcggtccgtttgcaagactgatatactttccgcagtcatgcaggattgctgccacctgaagtaaaagccgctctctctttcccagtccatggatttttttcattgtgtcaaaaatcagcgttgccatctgtgtcagtgcatcaatatgcggtgagtagctcatatagcgggcggacagattccttgcagccgagatgacatctgcatcaaaatcatggaccggtttgcatagcttatgcttctgtgcataatcatatgcaataccatcgctcacaatgacacccggtgcccagattttttcggctttcattttgcgcgccatgcatttaaaaatgatcatgtacggaatgatcagggaatcattttcatttgataaatttaattcttccgaaatctgttccacagtctttttgtcaagatcatccagaaatgccagaaaatcattggtttccatcagattttcatgtttcttcccggtgacttttccggcaacctccatgatataatctccgattatgatcagattcttcactttcacctgttctgtgaacattgccataaacacatttaactctttttctaccaattcttcaatctgcagctcatactgctctaagctgcagcttttttttgcaagctgttcctgcatgcgtatggtgccaagtccaagatgctgtgtcgtaatgactttgccctttgaaaagatagtaatctgcatgccgccaccaccgacatccacgactgctgcccccgttttgatcatttcttcaaactcacttcgcatcgcaaccgatttgtagctgataaagcggtgttccgagttgcttaagacatgtaccgtcagtccggtacggatgcggatctggtctaagatgaacaattcattgctcacatcgcggagtgctgcagccgcatatgcctcgtagccatccacctgatactctttcatgatcttcgtgaactgctctaacgtgtcacagagtgcttccaccagctcatatccgatcacaccgcgtgaatacgcatcccgcccaagctcgatcctgcttctgatataatcaattttgcggatgttttttctggcagagatctcaaaaattttcaggctcacctcataagagccgatataaatcgctgcaaatgtatgaattgccatattttatcctcctgcttcatgcgtacatgttattcctgttttccaagcagataattaataaactgctgtgctgttcttccggagagtccgccgtgggcaagttcccatttatttgcctcggcaagaagtgtctcctcatccatggtgataccgtttttctctgcaagggataccacgatatgctggaattcttttttgctcggtgcaccaaaataaatggaaacgccaaatcttgcatacagagacaacttttcctgtacggtatcggaagtatgcatgtcctctctcacttcctctttgtcggagaatgtctcgcggatcagatgacgtctgtttgaggtcgcatagatcaaaacattgtccggtttcttctcaagtcctccctcgatcactgcttttaagtatttatactcgatctcaaattcctcaaatgacagatcatccatataaatgataaatttgtaattgcggtttttgatctgtgcgatcacatcatttaagtcgcagaactgatgcttgtacacctcgatcagacgcagtcccctgtcataatactgattggcgattgccttaatactggtggactttcctgttcctgcatctccgtaaagcaggcagttatttgcctcctttccgcggacaaagctctctgtattgtcgatcagtttctgttttgcgatctcatatccgaccagatcatctaattttacatgtgcaatgtttgtgatcggtacgatctgtgctccatcctctttatgcagcacacgaaatgctttatgtaagcctaattttccaacaccaaattctccgtagaactctgtaacagcatccttaaaatcacctgcatctgccgcctgctctaattttactgtcagttcacagatacggtcacggattcttttattaaaaagctttccgctgtcgcctgcactctcataatgaagcagtgcatccatgcagtcgatctcataatcttttgccagctctgtaaaatcaaaatcaaataaatctttcatgatcttaaaatcatgcagtgcaatctgattgacggagccttccataccaccccggatctcacatccacggctgtatgcgttctcgttattgaccagaataaatgcaataaaattatgccagagatttcctttaaatccatgacttactgcaagttcggacaactggttaaaacattcgtaaagcagtgcctcgatatcctctctgttataatattcattctcatagttttccatgatccatgccatgttataaaataattttccattttcaaagtttttatataagatcaggttttttgtacttttcatgttttgctccatttcttcgtgtgcaaatcttatttccacacatttctttcgttctaataatttccaagaatcttaagtccaagcgtttcctctgccagacctcttaaggcattctgcactgctgcatcatttaaattaccctcaaagtcgacaaagaaacggtactcccagtttttcccctgtaccggtcttgattcaatgtggttcatgttgatgccattgtaaataaaatgggacagcatatggtaaagggaaccactctcatgcataccttcaaagcagatactgatcttttccgcctttgaagtgaaaacgcgtttgccggatacgataataaaacgggttgcattcatcttattatcctgaatacattcatccagcactttcagtccatagatatcagcagtcaggctgcttgcgatcgccgccttatgttttttgccgtcctcttttactttttttgccgccatggcagtatttttcagactatgtttttcccattcccggtggctctcaagatatctgccgcactgcatcagtgcctgcgggtgggaatagacatccgtgatatcggaaagttctgcatccggaagtccaagcagtgcatgattgatctggataatctgctccccgacgatgcagttatcgtattctaccatcaggtcataattttcagatacgatgcccgctgaagaattctcaatcggaagcaccgcataatctgcctctccgtttttgatcgcctccatggcatcacgccaggtttccacatgataactgtccgtctgctctccaaagtactctctcaatgcaagctggctgtacgcaccctctgtcccctgaaacacaatacgcgcattgtgataatctaaactttccacttctgtaaaatccggtttttcatacattccatgcgctgtcaaaagctgatactggcgttttctgctcatcgacataatctgctcaaacaattcacggatcccgtgtttattaaaatctgttttgccaagtgctgtcagcgttgcaagttttgaatcttcgcgttctttatcaaatacttttttgccggtattgatcttatattctgcaacacccgcagcaatctccattctctcctgatataaatctacgatctgtctgtcaatgacatcaatctggtctcttaattcttttaaatctttcatggattccacctttatttttagtattacttctactatattacattaacgtagcaaaatcaagggcagaaaaagtcatattccatatgaaaaatatagtattcgtgctctgaaaatgctataataaacacagatgagaagcaaatcaaacacattgtcacgtcagcataaaatgctctcagaatggaggccttatgaaaaaagttatcacgattctcttaattatcctcgtactcgccgccggtgtcggttttggtgtctaccaccacaaatcaaacgagacaaaattcaatgacgattacataaacggcaacacggctggcaatctctacaatgccggcatcttctgcacggcagctgatggtacgatttattttgcaaacccttccgacagcagcaaactatactcaatgaacagcgacggttcagaccttacaaagatttctgatgatgttgccacctttatcaatgcagatgacaattatatttactatgtgcgcaacaatccggtttttaccgaaccgttttcatttttgacgatcaatacagacagtctctgccggcttgaccgcagcaaacataaaaagagcattctccttgattcttccgcgagtctttacgcctctttagtcggaaataaaatttattaccttcactatgacgacaaagactttaccactttctatgaagtcggcatcgacggggcagacagtcatcaggtagacaagacaccgtaccgtccatgctccgtcgtcggacagtacatttatttcaatggcgtatcaaacgatcacaatatctggcgttttgacactgttactgacacctcggagctcgttctgaaaggcaattattacatgccagccgtaatcggtgatacgatctttttcttggacaatgaaaacaattatacacttgcaagcacagatctctccggcagttcggccatcacaacactcagcgacgaccgcattgactgttataacattacagggaactatatttatttccagcgcaacagtacaagcactcctgcactctgccggatgaaaaccgacggcagtgattacaccgtgattgcagaaggcaattataccaacatcaatgcgacggaaacagatgtctatttcagggattttgcttccggcgttatgtataagacaccgattgctgatccgtctgatgttgagatctttaatccgggaactggttcttctgacaaatgatcctgcaccggatccacagtttcgttttatgttcaaaaaaacacaggggacttccgttatcccctgtgttttttctatgcaaaatcaaacagtgagagctgattggactccggcatatcaccgagcagtcctaaatctcccatcagatcaatgaccgtcttagttgcctttgttctctgtctgaaatcgtctctggataagaattttccatcttttgccgcttccgccacagcgatcgcagcattatctcccataccgtcgatcgtatttaatgccggcatcagttttccgtcaatgatctggaaacggtccggttttgcacggtaaatatcgatcggtgtgaaatcaaatccccgcgcatacatttcctgtacaatcttcatgtcacggtatacatcctgttccttcttggaaagcgaatcttttctgcgctcataatctttctggaaataggtaaggcgctctcttccctgacacatgatctcatagttgaatccggtcgcacggattgaaaaatatgccgcataataggcaagcggataatatactttacagtatgcgatacgccatgccatcataacgtaagccgccgcatgtgctttcgggaacatgtatttaatctttaaacaggaatcaatgtaccactccggcacgtcatgtgcacgcatctcttctttccactcttcctttagtccttttccttttcgaaccgactccatgatcgtaaaggactgctcactgtcaagtcccatctggatcagatagatcatgatatcatctcgcgtacagatcgcagtggaaatcgttgccagtccctgttcgattaaagtctgcgcattgccgagccaaacgtctgtaccgtgggacagaccggagatacggatcagatccgaaaactcctgcggcttggcatcgataaccatctgcatggcgaactctgtaccaaactccggaataccgagacatccaagcgggatcccgccgatatcctccggcgtaacaccaagcgctgacgtatttttaaacaaagacatgaccgcctcatcatcaagcgggatcgtaaccggatcgattcccgttaagtcctgcaacatacggatcatggtcggatcatcgtgcccgagaatatcgagtttcaacaggttgtggtcgatcgagtggtaatcaaaatgtgtggtgactgtcgcagtcgtcatatcgtttgccggatgctgtaccggggtaaaagtattgatctcctctcccaccggaagtacaacgatacctcccggatgctgtccggtcgttctgcggacgccgacacatccctgtacgatacggtcgatctcacagtttctcttgtggatgccgcgctcctcgtaataattcttgatataaccaaatgccgttttatcggcaagtgtaccgatcgtaccggcacggaaggtctgtccgtaaccgaaaataacctcacagtacgcatgcgctttactctggtactcaccggagaagttcaagtcgatatccggctccttatttcccttgaatccaaggaatgtctcaaacgggatatcaaatccgtccttgactagtttttcgccgcagaccggacaaatcttatccggcatatcacagccgctcctgccggaaaatgccttgacctccggcgaatcaaaatcactgtatttacaatttgggcagcgataatgtgcctggagcggattgacctccgtgataccggacattgtcgccgcaaaggacgaacctactgaaccacgcgatcctaccagatatccatcctcgtttgacttccataccagtttctgtgcaatgatgtacataaccgcatatccgttggaaataatagagttcaactcacgatccagacgctcctttacgattgcaggaagctcttcgccatacatactgtgtgccttggtataacagatatcacgcagcatctggtcagaattttcgatgaccggcggacatttatccgggcgcacaggtgcgatcttctcacacatatccgcgatcttgttcgggttagtaatgacgacttcctccgcttttgccgagccaagatattcaaattcctttagcatctcctctgtcgtccgaaggtaaagcggcgcctggtcatccgcatccttaaatccttttcccgccatgatgatacggcggtaaatctcatcctccgggtcaaggaaatgcacgtcacaggtcgcaacaaccagttttccaaatgtttctcccagttttacaatacggcggttgatatcctgcagttcctcgatcgtgctgacggattccttgtcgctttttaacataaactcattattgccaagcggctggatttctaaataatcataaaattttaccagtcttatgatttcctcctccggccgtccacccacgattgcacggtagagttctcccgcctcacatgctgatccaagcagcaatccttcacggtattttacaaactcactctttggaatacgtggtctcttgttatagtaggtcagatgtgacagagaaatcagacggtacagattgatgcgcccgatatcgtttgtcgcaagaatgatcgcatgataagtgttcattttcatgatggtctccggcgaagcctgtcccatctggttgacctgatctaaggtttccatgccacggtcgtgaagcatctttacaaattttacaaagatctccgccgtacatcccgcatcatccacggcacggtggtgattctccagagaaactcccagcgcttttgctacagtatcgagtttaaaacggtttaactgtggcagcaaaattcgtgctaaagcaaccgtatcaatgatcgtaaactctttctcgattccctgtctctcacagtttttgatgataaaactcatatcaaaatctgcattgtgtgcgaccatgattgcatccccacagaactccataaactgtggcaggatcgtctctatcttcggtgcatcgatcaccatatcgtctcggatggaagtcagttcctcgatccggtacgggatcggcacttccgggttgacgaacgtagaaaaacgttctgtgatctcgccgtgcaccactttcactgcaccgatctctatgatcttatttttatccggtgaaaatccggtcgtctcaaggtcaaataccacataggtgtcatcgagattctggtttttcgagttggtgatgatatcctttaaatcatccaccaaatatgcctccacaccatagatcaccttgaagtcatcatccggtgagatcgcatggtttgcatccgggaacgcctgtacatccccatggtcggtgattgcaatcgccttatgtccccatttcatcgcacgctttacgatatcttttacctcagagacaccatccatatcgctcatcttggtatgacagtgaagctctacacgtttctccgggctcgtatccatacggactgaggtaaaatccgggatttttttgatgccgacgatcgaacctatcgtaagctcactgtcaaatttgtcgatggtcgtgacgcctttgatctttaggaaagcaccttttttcaccccctcaagcaattccggaagctggtcatttctggtaaaaatctttaaaacaatggagtccgtgaaatccgtgactgacatgatcacgatcgttttttcattacggatctctctcgtctcaagtgtcatgacctgacagcgtatcgtaacctctcccatctccccgacaatcttctcgattggaatcgtctcatcttcaaaatcttttccatagagcacatccgggttatctgattttttatatccaccgtaggatccgccatcatattttttgcggaattcttttttaccaaacgaattttctccctttccgttcgcgtttcctgcattatttcctgcagcagattcttttgaatgattttgttcctttgtggcagttttcatggatgtatcagccgtctgtacttcttccgcctttgccggtgcactctcctcatgaagctgtacacgttttaaaatatttttgatttcaaactggatctgtaaatcactgtttttcttgtgtttgctctctttcggttcctcaaaagcaagttctacggaaaggtcaagtccacagcgttcacacaccactttctctaaaaattcaacgatctcatgtgatctggtctgtgcaatgatcgtgttttcaagagtcaggagcagatgggaatctcctgtaaactccattttggcggagcgcagcagattatattccatcagactgtaattttttaattcctctaaaatactgtccttatacagatccatcagtttttctgcagtatactgctctgacaactgatatttttcaatgactttaacgtccatatgccggtttttaaaaatctgatcatgtatgtttttttccagctgatagatattctttttatggataagacgtgttccatttaaatagatacggatatgatctttctcatgattcattccgaccctggtaacttccgtctctgataacagttttttcatatctccattcacttccagtgtcggaaatacatcaaaaaacatttttgtcatgttttacccaactccaacttacttaattgttgcttgttcacacattccgtgtgaccagtaacacctaattttcattccagtgcagcagttcatagcgaaggctctctaacagttcggattccggtactttcttgtagacctctccatgtttgatgatcagtccttccccgatacctccggcaattccgatatccgcctcttttgcctcacccggtccgttgaccacacagcccataacggcaactttgatgtctaacgggatatcggcaaccatattttcgacctggtttgcaagtccgatcagatcgatcctggttcttccacaggtcggacaggatacgacctcaataccgcccttgcgcagtcctaatgtctttaagatcagctttgcggatttgatttcctctaacggatctccggtcagtgaaacacggatcgtatcaccgatgccctgatgtaaaatcagtccaagtccgattgcggatttgatatttccactgatgatcgttccggcttcggtgatgcctacatgcagcgggtgatcagttttttctgcgatcagctcatgtgctttcacacacatcataacgtccgaggatttgatgctgataacaaggttatcgtatcccatatcctcaatcatttttactttatccagcgcactctcaacgattccttctgccgtcacgccatggtatttttctaccagatctttttctaaagaaccactgttgacaccgacacgaatcgggatctgccgctcttttgccgcatccacgaccgcctgtacgcgctctctgcttccgatgtttcccggattgatacggatcttatctgcaccgtgctcgattgctgcgatcgccagacggtaatcaaaatgaatatctgccacgaccgggatctccacctgttttttgatctctgtcaatgcttcggcagcttccattgtcggcactgcacatcttatgatatcacagcctgctgccgcaagtttattgatttgtgccactgtcgcagcgatgtcctctgtctttgtatttgtcattgactgaatcaggatcggattaccgcccccgatcactttcgaaccgatttttactgtttttgttttcactgtactttcacctctacatgaaaatttttcgaatatcgttaaacattacaaccaccatcaaaagcattaaaagcataagtcctataaaatgcaccatgccctctttgtccggatcaacctttttccccctgatcgcctcaacgatcagaaacaccagtcgtccaccgtccaatgccggaagcggcagcaggttcataacaccaaggtttgccgagatcagaatacaggtatagagcatctgtaaaaatgccgcataataaccgtaggaaacactctcctcatagctgtcaccgatcgcatcgacaagcccgaccggaccactcatatcatttaaggtaacaccgcctgtggcaagcatttttaagcttccaaacgtcgtatcgatccagtattttacctcatatccactgtacagaagattcttaaacacatttcctttctccacttcaccgccgacaaaaccatagcggtatctgccaagttcttcatcatacagcggtgtcagctctgccgtatatctttttccgtcacgctcataagtcacttccacggtctcccccgcatggaacatggagtaggaactgacttcccggtaaaaatgaatatgttttccgttcatttttacaatgacatcccccgcctgcatacctgcctgttccgctgcaaagccctcgctgacctctgtgatcttagggacatcatatccattgcaggaaagaaggataaaagaaaagacaaatgccatgataaagttaaacaccggtccggcggcaaccacactgatccttgcccagacagactttttgccaaatgcccggtcatctgtactctcgccgtcttctccctccatcatacatgcacctccaaacggaagcagttttaaggaatatttcgtttctcccttcgtcacgccaaaaatcgtcggtccaagtccgagacagaactcattgacacggatcccatttgcctttgccagtgaaaaatgtccaagttcatgaaatataataatgatactgaagatcaataatgcgataataattttcatccgtttttaatacctttccattctgcctctaagcccatttctgcccgatatattcgtatactgcctgctctgtttctaatacctgatctaaagtcggatcgctgatatatgccacatgctccatgcagtcctcaatgatctccgtgatctgcggatagctgatcttacggtctaaaaacattgccactgcacgctcgttcgccgcattaaatacggttggctgactgccaccctttctcattgcatcgtatgctaacgccagtccccggaaggtctttgtatccggccgttcaaacgtcagacttcccagttcaaaaagatccagtctctttcctgacatttttctgcgctccggataatagagtgcatactggatcggcagacgcatatccggtgttccaagctgggcaatcactgctccatcctcatactgcaccgcagaatggatcacactctgcggatgaacgaccacttcgatctgatctaattccacaccaaaaagccattttgcctccatgacctcaagtcccttgttgaccagtgtcgaggaatcaattgttatttttcttcccatcgaccagttcggatgttttaaggcgtcctccactttcatctctgcaagatcctccgcgttttttccgcgaaatggtccgccggatgccgtcagaaggattttttcaatacggttgctctcattgccctgcagtgactggaaaatcgcgctgtgttcactgtccaccggaaggatcggcacatgatattcttttgccagcggaatgatgatgtgtcctgccgtcactagtgtctctttatttgcaagtgcaatttttttgccagccttgattgctgcaactgtcggacggatccccatcatgccaacgatcgcggtaactaagatctcactctccggatgaactgcgacttcagtcagtccttccatctttgaaaccacttttgtgtccgtatccgcaattttaatctttaatgcttctgcggcttcctctttgaaaacacataccagtttcggggaaaactccctgatctgctgctctaataatgtaatattacttcctgccgcaagtgcaacgacctcgatatctttctgttctcttacgatatcaagtgtctgtgttccgattgaacctgtcgagcctaagattgctatttttttcatacaaatcctcttttctaagcaacttgttgcgaagaggcgacgagaatctcaaattctcggaggcatattttttatgccttgccatcaaagctatttgttttgctcagaaacaaatagccgtgcgaaaaataagctatcaggcttatttttcacactaatatcctctgtttacaatacaataaaatttgctgcaagaaaataaatcatcggcgccgtaaaaatcacactgtcaaagcggtccagaataccgccgtgtcctgggatcagttttccataatccttgatctcatagtttctcttgatcgcagacgcagtcagatcacctaccatggagatcaacgctccaaccgcactgatcgccgccatgatccatacatgctgtgtggtaacacccatcgcatttttaaagatcatgccatagatcacagttaaaagtgcagcaccgaccactccaccgattgctccttccacagattttttcggacttaacttcggagacattttatgttttccaatcagcataccaacacagtacgcacaggtatcacatccccaggagcacaaaaagatcagccatacgatataggcacccgcggtgagcattctcgtctgatatacataagaaagcatcacagccacataaaacacaccgaaaaatacagctaacatctgctccgtcttatatttcggataagtaaatacatagacaaacatcaatgccatcaggaatcctaaaacgactaccataagatccggcagaaatgcccatttcagattacagtaaaatacggtcgccgcaagataccccacgattcccggcagttctttttccacatgaaaaatgcggtataactcaaacattcctatataggaaataagtaacgtcgaaaagagtaacacatctccccccgtgataataagtactaacgcggctgccaccaacacgatgccgctcaacagtcttgtcttaaacatatatgaaaacctgccctttcttctttcggtctatttcgcttcctctgccagtccgccaaatcgtctgtctctcttattatacgcttccacagctttttctaattcctcttttccaaaatccggccatggcacatcggtaaaataaaattcactgtacgcaagctgccataacagatagttcgaaagacgctgctccccgcttgtgcgtatcaaaagatccggatccggaattcctgcagtatccagatatgaggcaaacagatcttcatttaattccgaaacctgccttgtaccattctccatatcctgacacatttttttcattgcgcggatcatttcatccctgcttccataattgatggcgatctgcaggttcagaccatcattttttgcagaagctgcttccagctccacgatctgtttctggaaccgggcactcaaacgtgtggtatccccgatcacgcgtacacgcatattatttttatctgctgttttaatacagttcttcagataactttccagcagcttcatgagtgctgccacctctccctccggtctgttccagttttctgtcgaaaaagcatacatagtcagatatttaattcccatatcatgtgctgctttgcagactatttccacattttttgccccaaccgtatgaccatagtttctgggcattcccttactttttgcccatcttccgttcccgtcaaggataattgctacatgctgcggaattttcattgtaatcaccacgcctttccataacctgcatactttgtgcctgcattcattcataaagtgaaaatgaggacacgccattgtcatgtcctcacctctatgttctatacaaaaatccctaaactgtcaggatctcttttgtttttgcctcaacagccttgtcgatctcagtgatatatttatctgtcattttctgtgcgccgtcctctaactctttcacttcgtcctcggacacatcggcagacttgcttaatttcttgaaagaatcattggcatcacgacggatattacggattgctacttttgcattctcgccttttttcttaacatcctttgccagttctttacgtctttcctcagtgagttccgggaaaagaagacgaatcacttttccatcatttgtcggattgattccaagatctgacgttaagatcgctttctcgatttcttttaccatagaagcttcccatggctggatctgaatcattctcggttccggaacattgacgtttgccacctgctgaattgcagtcggtgttccataataatcaacttttaacttatcaaggacatgcggattggcacgtcctgcacggatgcttccgaactcctctgacaggttattcattgttttctgcattttttcatcaaactgaactaatctctcatccatatttttactccatacctttcacggttctttgttacacggttacttttgtaccgttaaaatcgccagtcatggcttttacaatgctgttttcctcgttcagtccaaaaacgaacatcggcattttattttccatacacatgatcgacgcagtcaggtcaaccactgcaagtttacgatcgatcacttcctgtatggatacttcgctgtattttacagcagaaggattgatctttggatcactgtcgtagacaccatcgattgcttttgcaagatagatgccctctgcctccatctcaatcgcacggagcacaatgcctgtatctgtggagaaatacggatgtccggttcctcctgcaaaaaatacgaccattcctttttcaaaatacttatttgcacgatcctttgaaaacagttttgtcatgcttccacactcaaatggtgtcaggatctgtgttttcattccaacggaacggaaaatttcagaaacatagatacagttcataactgttgcaagcattcctatctggtctgcctttgtacggtcgatggtttcactggttcttcctctccagaaattacctccgccgatcacgatgccgacctggatgccctgatctgtaatctgttttacctgtcttgccacttctgtgacagtcggttcatcaaatccggtatgtttttcaccggctaaagcttcaccgcttaattttaagaatactctcttcatattcgattactcgtttcctttctgagcattaccattgaacaggctctgtacatccacgtcagaatagcactgtgagcagaatccttcgattaccgcaccattgttgatctgtacagaacgtgatttgatgttacccataacaactgcggatgtatccacaacaaccggtccctgtacatcaatatcacctttgatggctccggcaatcactgcagaagtagaggtcacattaccgatgatcacagaaccaagaccgatcttaatggttcctgtactgacaacctctccctcaatctttgcagcgtctgcaaaaaattcagatgcactgctgtttccatttacaacgccggttacaactaatttgccgttgcatcccacatttccttctacctgtcctcttacatccaaggaaccgtttgatacaatatcacctttgatgatcgttccctctgtgattacggatacctcatcagataccggtgcgctctggttattagttacaggtgctgttgtattgtcagccatttttctttcctcctgggttgcttttgtaatatttgaaactgtttcatttctttctggttcaggtacagatgcaggcacaggtactgctgctctttctgtcggggcacttgcattccttgctgccatctctgcggcgcttcttgctgcagcaactttctcagcttcctgctttgtcacctgttccaacagaccatccagcttggaaagttctgtctcaacatccacttcgccttctaacgtattaacctcaacgtcatcttcgttcgtgctggtttccaggttgtcatctgcaggcatcagttcattgactgcctgtgagaagtcatctttaaaatccttgaaaaatcccatgttcattcctccatttattctcagttattccactgtgtctgctttcacatactgaataacctgtgtatcttcatcaatcggtaatatttgtgcgcccattccctctaaagcttcaatcaaaggtcctaaagcttctaccgttgctgacttatccgttccgtcatgcagtaaaaccaccgacgttttatattttactacatcatctgtcacattttcaactatttcctcagaagtatatgcggtcgaggcgccatctcctgccgatacattccagtcataataaataattccctgtgtattaagataatgaataaagtaatccatcggtacgttactgatgagattgctgcttcctcccgggaaacgatagtaaagactatccactcctgtggtctgtttcaaaaaattcttcaatgtcatataatcctgttcgaacgcatcttccgactggtagatcacactatactggttggaatacgaattcatgccaagtgtatgtccctcatccacaatacgttgatagacagaaagcatttcttcatcctggtttccattcacaaaaaaagtagcttttacgccatatgcctgcagcacatccagaatctcagatgtgtgttccgacggcacattatcaaacgttaagtatactttatgtatatctccctccgatgccagattgtcctcatcggaaatcccggatgcaggaggtgttactttatcccatgtcatctccgtctgcatctcttctgttgtctctgtctcctctgctatcacaccaccattcagatctgcggccgctccggcattaatctgatccgtgttctgctcactgctgcttgtcaccagctgatccagcttatgttccagcgacgtcatcttcacaaatagcaccacaaccaatatcatggacagaacgatccatcctgccacaatcagtatgatactgtatcggattttcgtgatccgctttctccgctttctctggtaattcagtacttctgaatctttatcctgcatacaatacccccaaggtaatcgttagtacctatctattgtaacacatttttctatttttcaaataaaaaagcgcaaaaaaattgattaattttttcgcactttttttattattgtctgattatttttatttctattgtactattttattttccaagtatgtttgcaataaaaaaaccgccaataaagagtaatattccaagcagcagctgtccaaaaccgatagaaacgatattcatcccggataacactgcaatcggcgatgaagtgaccagccccataattgcaaaatacgttttcctctcctgtttctccaataaatattccacaagttttgatacaagaaatattccaagcaccacaccgataccaaatgggatgagcactgctgcacaggcgaacagctcctcccacttaagagccggtaatgctgccaaaaaaccgctgattctgtttatgatcggcgtataatatcccagagacatcaacagcattgaaccactgaccccgggaatcaccatcgttgccgcagctaccgttccaaccacaaacagcgagatactgttttttattcccggctctaaggcaacatctgttccctgtttccagaactgcatccagacgaccagaccaaaaaacaaaacaaacagcagcgtctctgaaaatgtgatccgctttcccatgattttgggcagcaatagcggtactccgccaaagatcagtccaataaacagcattgccgtctcaaatggaaattccaaaaagaaatatccgattgcaaatgacagtccgccgattccaatcagcatgccaatcgcatagggaagcaaaaactttacgctcttccagaaatgttttggcattcccgttaccgccccgatcacatccccataaatccccatagaaaccatcatggttcctccgctgacacccggaatgatattggcaacaccaattgcaattccgcgcagcacctcttttaaaaatgacatatccatcctccaaatcctgttattctgccaatcttacttctgtcatctcttgtgcaatgtttaatgcatgatctccgattctttcaaaatccgtgagcatttccgtgtagagaacactcccttcacccgatgccgttccttcctgtatccggtgcatcatacgatttctataatcctctgtcatgtcatccatcttttgttcgagtgctgagacacggcttaattcgtcgagtgcctccatattttcatttaaaagcaaagtcagaagttcttcgcaggtctgctgcatctgcaggatttcttcccgtacttcctgtgaaaacctgacatctttttctttcagccactctgaatatccacagatattcattgcatggtcgctgattctttctacgttactggtcactttaaaataggcacttaaaatcctgctcccccgtgtattggactcatgcgccatatttgtggatatgtactcagagatctcccggtttaaaaagtccacatactcttctttttcttccacttttggaataaacccgtcatcacagtttaaaaatgctgtaaaactgtctgcgacatttttctttgcaatctcaagcattcttgcaatctctttgtgtgtcagttcaaaattgatcgctgatacaccaatttttccctctgtcaccggttttgtattttttaaatattttaaatacatcccttcctcaggctcgtccacgtccggcagaattttttctgccagttttgccaatagatttcctgccggtaacagcaatatcgttgttacgatattaaacagcgtatgcatgttggcgatctgtgcagccggatttgccggtgtaaatcccccaacccaggatgtcagcggtgtcagcatacagagtatggtaaaaactgcagttcctatgatattaaacgaaagatggatgattgtcgtccgctttgcgttccgccctgtaccaatggacgctaacactgccgtgatacaggtaccgatattttgtccaaacagcacatacaccgccccggaaaaagaaattgccccacttgttgcaagtgcctgaaggattccgaccgatgccgatgaagactggatcagtgctgtgaaaatggcacctgccaaaattccaagcagtggatttgaaaacttcgtcatcatatcaataaatgctttggaatcccgcagcggcatcattgcggtgctcatcatttccattccgataaaaagaacaccaagaccagctaaaatacctcctatgtttcttaccttcggctgttttagaaaaacaaccatcacaacacccaaaaatgctataaacggtgcgattgctccggcatcaagtgcgatcagctgtcccgtgatcgtcgtgccgatattggcacccatgatcactcccaccgcctgacgcagtgtcatcattccggaattaacaaaacctacaaccatgactgttgtcgcggaggatgactgtatgatcgcagtgatcactgctccgactaaaacacccagataccggtttgtagtcaggcgttctaagatctgtttcattttgttcccggcagcagcctccatcccctggctcatcatattcattccatacagaaaaagcgccaagcctcctaacaatgatgcaaattcttttgctcccattttatccctctttttttcgttattacggcatttttctgctgtccctgcgggcgctttactgccgctttgccacatactcactcaacatatcagacgtatcttttaccgtcaaccgggatatcggattcttaacgcttcctgtattgtttttatgaagtttttgtcaattttgtgtaaacaatagaatgttatgccttcagcagaacgactgctgtttcaaggctctctaatgtaatatgatctgcatctgccagttttctccttccggcatttgacagcaaaagttttttggcagttccaggcagtggcagacttactgcctcttttccgtaatttgctgccacgagtattttctgtctgttttctttacccatacgcataaatccaaacactgtatccgtatcttcgtaaaccggctctacatttccatagacaaatgtttcttcgtattccggtgatttgcgcagtgtaatcagttctttataataggaaagtacagagtccgcccttccctcctgctcactgacattgatctctttataattcggattcactgcaagccacggagcatgtgtgctaaaacctccattttcatctgcactccactgcatcggtgtgcgcgcattatccctgctgttttcatagcagcatgccaacgcttcttcttttgtgcagcccgcgtcgattgcaacctgatactgatcttttgtactgatatcatcatattctgaaatatcatttctatgacagtttgtcatgccgatttcctgtccctgatagataaacggaattccacgcagcagaatcgaagtcgtagcaagcatttttttgcccatttcattctgcgcatattccggaagataacggcttgcacctctcggctcatcatgattttcaatgatatttgccttgaatccaatcccctccatctccttctgggatgcaaacagaacctctctccaccgcttaaaatccaccggtttgctgtcataccagccatgttccccgtaagtcagctcaagcgcggagaaatcaaacatacttgagaaatgcccatcatctccgacaaactcccgcagttcgtcctctttcatattaaagacttcgccgacggtaaaagcatcatatttctcgaaggtctcatgtttcatctcctctaaaaattctccgacgccgtccgtctcctcaaccatttttacacaggataccagaccatcatccccatcgggttcataggacgggaaactcgtatctttcttgatattaatgattgcatcgatgcggaatccgccaagtcccttatctaaccaccagttgatcattttatagatcttgtcgcggacttctttattctcccagttccagtccggctgttcttttgcaaacatgtgcagataatatttatctgatcccggcaccggctcccacgcttttccgccaaaataagaacggtagttgctcggctcttttccatctattccttttacaaaataaaaataatcggcatatggcccgtccgggtcggtcagcgctgccttaaagtattcatgttcactggaacagtgatttaccacgagatccatcacaatatacatatcgcgctttttcgcctcggcaagcagctcatcaaactcttccatggttccgaactcttcggcgattttatagtaatcagatatgtcatacccctgatcaacaaacggcgatttgtagattggagagagccagatgatatcaatgccaagttcttttaaataatccagttttgagataattcctctcagatcaccaatgccgtctccgtttgtatccagaaaactctttggatagatctgatatgctaccttgtcatgccaccattttcttttcattttttcctcctgacacattttatttcaatattcttttttatattttttgcataattctgttttctttttcagctgatgtaaatattatatttgatttttattcgtttttcttgcattatggttggataatattgtacaatactgctatcatagttgcccgacaaatgctggtttgtttatgaaataaatcgcccgtcccaatggtgtgtcgcaggtctatgagtggcatcttgcgcaaagccggagttaattttggttccgttgtacgaaaataagaaaagtctaagtgtgtctgagttagattttctcggagtgacgtgaccggcgttcaacgagccatccgtggctcgtgaagccttgttctgccatccgtggcagaacatcactgtgtatctacagacacactaagattttctaattttctcccaaagtcacaaaatcagctcaggctttgtgcaagatgccaatcgtcaggttgtgaacaccatttgggtgggcggttcatctcaaaatctggaggcgtaggtgcgaattttccagtattatcaaaccaataataatctattaaacatagttatttggaaatatttttttaacagattcagacataaaaacactaaaaatttacgcaccgcccaaggttgtaaaatgagttctccggcgaagggtggttcacaacttagtggctggcaaatcgcatcaagccaggactcgttttgtgactttgggagaaaattagaaagtctttgtatgcctgttcacaatacagtgttgtgctgccatggacggcagcacaagtcctaatgtgcccggacggcacatttaggacgcacacgtcactccgcctcaacctgaatcaggcatacttagactttcttattttcggacaacgaaacaaaacagtcccggcttgatgcaatttgccaatcgtaacccccagaaccaccctacacagggaaactcatatcacccacaaaccagcatttgtcgggcaactcatgcttggatatattgtgtattttcaggtagtaaaaaagctggcagcagattcgcatatacagaccgaaatctgcaccggcagaatggagtttttatggcaatcagtttatctttagaccaaaaagaaaaagcaaaacacggcgaacagctatttccattgcagcgttatatcacaaatctttcctccacttatccggcagtcactgcacactggcataaagaggctgaatttaccatgatcacagacggaaactgcacttatcagatacagctttgcccctgccctgtcaatgcaggagatcttatatttgtgcctcccctggttcttcattccatccattccaataccgatcctgcaatgacttccgagacctatgtctttcatatgaattatcttggcatgggaaatgcggacatctgcgcagtaaaatatctcacaccgcttgcgatgcaaaaaatcatcccaccctatatcataaaaaaagatcatccagtctatgcggatgccctgtcaatattccataaaatcagtcagctttatcacgccaaacccatcggctacgagctaaggatcaaatcactccttttagaactgattgctctcctgctccctttctgccaggaggattctgcattttcccagctttccaatgaacataccagtaaattaaaggctgtgttagaatttatcgagcagcattatgctgacccgttatcggtcgcagatctcgcatctgtctgttgtttcagtgaatatcattttatgcggtttttcaaaaaatatatgggagaatctgccatggaatatgtacggaatgtccggttggcgaaagcagcagaactcttcgaacagggtgcacaatcctcgcttgaggtctcactctcctgtggatttaacaatctgtcctattttcaccgggaatttaaagaaaaatatgggatgacaccgggagctttccggcggaagatcaatgtttagatgatttcctgtcataaacagatgtttttacatcgaagcataaaataacccttataaacgatgtcaccaccatttataagggttatcaatcttttcagaaacttaatacaaaaccaaattaagcgttcatctgagctgcaacttctgctgcaaagtcttcctgtttcttctcaagaccttcacctgtctcgaaacgaacaaatctcttaacttttacagtacatccaactgctttagaaacctcatcaagatatttagcaactgtctgttttccatcctcagcttttacgtatacctgatctactaagcatacttcttttaactctttgctgatacgtccttcgatcataccgttgatcactttctccggtttctgggactctttcggatcgttcatgatctgagctaaaaggatctctttctcatgtgcgatgtaatcagcgcttacttcgtctctggaaacgtattttggatttaaagctgcgatctgcattgcgatattaaccatagcttcttttacagcgtcattgacaacatctgtatcagcatctacgataacaccgattcttccgccgccatgtacataagaaacgacgcagccatgctctgcaacaactttttcaaatctacggatctttaagttctctccaattacagctactttctctactaatgcatcattaacagtcttagaagcatcctcgttccatgcctcagccatgaatgcatccatatcttttgcatcagagtttacagcctgtgctgctactgcttttacgaaactctggaatgtctcattcttagcaacgaagtccgtctcagagttaacctctacaactgctgctgtcgtatcatcttttacaacaacggtgcaaagaccttctgctgcgattctgcttgctttcttctcagctttagcctgtccgttctttcttaagaactcaacagcctcgtccatgtttccattggtctcgtttaatgcttttttacaatccatcatacctgcgccggtcatctcacgcagttcttttaccatagctgctgtaatagccatttttcaatcctccaaaattatattttatgatataaaagggacgttaacctgcgtcccttttgttttgtcacaaatgacaaatcttatgcttcctctactgcctcatcagctgctacagactctgcttcttctgcagtcatctctgcaccctgatttgcctcaataacagcatctgccatcttagatacgattaatttaacggctctgatagcatcatcattacctgggatcacataatctaactcttccggatcacagtttgtatcagcgataccgattaatttgattcctaaagtatgagcttcctggatacagattctttctttcttaggatctactacgaagattgcatccggaatcttcttcatctctttgataccaccaaggtttttctctaatttttcccactcttttttcagtgcgataacttcttttttcggtaatacttcgaaagtaccatctgttgccattgtctcgatctcttttaatcttgcgatacggctctgaatagttctgaagttggtcagcataccacctaaccatctctcatttacatagaacattccacaacgctctgcctcagttttgattgcatcctgagcctgcttctttgttcctacgaaaaggattgtgccacctgctgctgcgatatcagatactgctttgtaagcctcatctactttaccaacggatttctgtaagtcgatgatatagattccgtttctctctgtgtagatgtatggagccattttagggttccatcttcttgtctgatgtccaaagtgaacacctgcctctaataactgtttcattgaaataacgctcatgtttctacctcctggtttttgttgttataaaaagctgtgcgtccggctttttataagttgcttccatgtgtttcattctttcaggcgaccatctggcaccagcctgtcggtccacacatgtgtttactcggaatattcttttattccgtcataaccttgcaaattataacacacgccccaaccagaatcaagtacttttttctgattagggcgtatttttctcatttactctgttttattgctgctgttgttccattggaccggcttttaaaatatttgtaatttcttcataagatgcatgatatggaatctggtaggttcctgcactgataaaggaagcataaccaacctcacttaaatattttcgcagtccttccgaatcatcgatcacaccattggctgcaagattttcgcacattgttctgcacacatccccacggtttacaaccaatgtaaacggttcctgctgtgtctgttccgcattttctgcattttcagtatccgataccacagactcctgcggagtttctgtttccggttccttcggcacttccatctgtgtttctgtctcctgctgtaattcctcggcagctatctgctgttcgtttttttgctccgtctcttccggttccgtggtttctgtttctgcaattaccgcactattctgttccggcataatcataccaagctgtgcagccttttctataatctgttcatccgtcattttaggcttctgcatcgaaaaacaacttaccagaatgatcgttgtgacaataatccctatgccaagtcctcttaaataatattttagtttcacgaatctgtatcccctttataaagtccaagtacaagatttacctctccgagtcctaccccaagtgcctttgcaatctcaacactctgcattccctttttacgcatttcgaggatcctgcctgtatggttttcctccgtttcaggttcttcttccttttttaagaccgggacttcctgctcttttgtctccactttttttgctgccggctccggctttggcacaggtgctggctccgctgcttttttctttgccattccttcctgtatgctcttgacatttgctgcaatcttctgtaaatccgtagcaagacctgtcagttctgtgtgtttgtcattcagcatattataaagaaacataatctcattatgcgtcttattcatattttccataaccgtgtcagaatattcgctgatggccatgattttttcatttgtttctttttccaatgccctctccacctgttctgaagaagcatcaatctgtgcctcaattgactcttctaccttgctcttagcatctgctaaagcaccatcaatgatcctgcccagttcatctttacttaattctgcaatcttatttaattcggaaggagataaacgttccgtgataaaaaagcttccaaccataaaaacaacccccgtcagaagcaaaaaaaatactattccagtcatatcaaccgttatgcctttcattatattttgacatcaaagctggtcctgcgttccttaatatgaacacttccttcatcctcatccggctggccatgcttttttttcttttttccattaccgctatagctgttattccctttttcccgggcatcgtatcggaattcctgattgtccttctgttccgggtcctgtactttgtgtgataaatcagattcctgtttttcctgccttacttcaatgttatactgatctgcaaccggtctgctatcctccgcatgcttaatattgccaatatcctgcgttcgttgtatcataccgctcaaatcaactggtcttatcgacataacatatcacctccggacttactgtcagtcaatcagtattcccatatagtttcccatctttttgcgcatttttaacaacgcttttgtatgaagctgtgaaacccttgattccgaaacttccagtatgctgctgatttcttttaacgtcagatcctcataataatataacaaaataacctttttctctttttctgtcaaaagctccagcgattccattaaaaccttttttagttcttcttcctgaacagactcctcaggctgaataaaatgcgaattgttttttgcatccatcacaggttctccaccctgttctacaaattcattcagtgagataacatttgtaacattcaactgtgtctgccagtcatttaattcttcctcaccgattcctaattcttgtgctatttcttcgtccgaggcatttcgccctgttttggtttcaatctgcttgatcgcttcctcaattttcttgcgtttttgccgcactgtccgtggaatccagtccatttttcttatctggtctaatatggatccacgtattcttaagcttgcataagtttcgaactttacatcctttccgcgatcaaatttgtctatcgcgtctatcagtccaaatataccatagctaaccagatcttcatactccacgttatatccgagatacatgctaagccgccctgccacaacccgtacaagcggagcatactcgataataattttctcccgcagctctgccgaaggatttttctgatactcttcccagagcttttctttttctaccgttttcatatgaagcccccacgtttcagttatttctcatcctgctcatcgctctcctgctctggctcttctttctcttctgcctctgccggagtttcttcaccatccgtggtttcttcttccatatccttaaaattcttatcaatcaacagttttacaattccgccaatgatataaaacacaatcaggacaaccagcagcatttttacaaatctgccggtttccatatgtcccgccattcctgcaatgcagaccacaagtcctgccacaagcataacgatcgctggtatcggctttgttttcataatgcatccatgcctttctatcagataatctttaacggtttacctaccgacttgatataaaattccccggtatcacaatgaagttcaactgtgcgaccataattaagtcccgtatcttctgcaacaagcctgattccaagctgctttaattttgcttttgctgcctctgcatttctcgcaccgatattaccaacatctgacaatccacttacctcaaacattcttgcacccccggcaatcttagcgatcaatctgcctttatttgctcctgctgcaattacccgacgtaataattcgtcaatccccgtatctgcaaactttgcgatattactgttatttctgacctttgtactgtccgggagcatataatgaaccattcccccaacttttgataccggatcataaaataccagaccaatgcacgagcccaatcccaaagttgtaataacatcaggggctttacatacattcaaatctgccatgcccacttttattacttcgctcatatatccttctccttacaatgagattccaagtgacgttaatatcttttcataggatccctgctccggcatcagtataaaatatccgttgatcgccacgtctgcgcagatctcggtctgaatcagcagtgcattatcaccaaactgtccaaactcaatagccggcacacttaagatagaagctgccatatccaccgcaatatatggaacagacggagaaatcacaagatttgtcatagaagaaagagctgacaaataagaacctgcaatgatgtttcctatttcttttaatgcggatagttccatttcgtcaaacggtttgtccgctggcacatcttccatcatcagtttgttgacaagataacgtgccgatggaatatctaccagaaacatcatactaccctcgatgtcattcattacctctaagaaaatgccaacaattgtttcatcctctgcaccgacagcagttcccaattttgatacttccatcagttttacatttggaacattcatgtctattttcatgcccagcatatttgcaattgccgtagttgcatttcctgcaccgatattgccaatctcttttaagacatcgagatacatattatttacgtcttccaacgttaaatttcccatgaattgctgattctcctctcattttgcacaccagataaaaatccggtgggactttacattctataaaatcccacctttttattaattattttcttctaccagtgcattgatctcaagcagagaaatcaactgatctccatgcttgccgattccattgataaatcttcctttattggaaactttatcaatttcatcctcacttaaattcacaacttctcttacctcatccacgatgacacccagggaagcattttcttctaattttaagataatgatcctgctcgcatttgtcagaacatcatcttcaagtcccattttcttacgtacactcataaccggaacaacctcaccacgaaggttaattacacctttaaaatatgtctgtacttttggaactcttgtaattttctgcatgcggacaatgttatcaatatagctgatatcaattccatactgctcactgcccaccataacaacgatatattgtttggattctttttccgttgtttcaagattattatttgccatgctaagtaccctccattacattaacgtattcacatctaagatcaatgcaacttcgccatctccaagaatcgttgcaccgctgatcagtttgttattgtcaatgtattttccaagcgacttgattacgatttcctgctgtccgatcagattatcaaccacaagacctgccatactgtcacctttcgttacaataacaacggtcaggctctccggctcttcccttggctcaagatcaagcacattgtcaagtcttactaacggaataaccttgccacgcagatggattacttcctgagcttccacatatttgatatccttaaccggaatatcttcaatgttggagatggaaccaagtgcgatcgcgtatttttcatctcttacttctaccatcagggcctggataattgcaagtgtcagtggcagacgtaccgtaaaggtagttccttcgcccattgcagtcttaacttcaacatctccgcctaatgcctcaatgttagacttaactacatcaagtccaacacctcgtccggaaatatcggtaatcgtctttgacatagagaaacttggcaggaacaaaatgttgatgatatctttctgactcatgctctcagcctgttcttctgtgataattcctctctcaatcgctttatcacgtactgcagccacatcgataccggcaccatcatctcctacctggatgattacgttattaccttcctggaatgcatttaagaaaatgcttcccacttccggtttaccgagggcaacacgtgtctcgttatcctcaaggccatggtctgcggagttacgcagtaaatgctgcagcggatctccgatctggtcaacaacggtacggtcaagctctgtatcttcaccagtcatgtaaagttccatcttcttattgagctttcttgaaagatcacggatcatacgagggaatttatttacaacgctctcgattggaaccattcgaactttcataactgactcatgcagatttgttgtgatgcgctccagatactcgatctgctcatgataggtctggttctggaaatcaccggactcagtggatccgattgccacaagactgttctttgcaatgataagctcagatacctggttcatcaaggcatccagcttttcaatatcaacacggacagtacggtttgtcaccggttttgcaacagtctgtttcttattgttctgtgttgcaggtgcttttgccggtgcaggttttgtctcctgagccggtgctgcttctgcctgtgcagaagcctctgtctttgcggcttcctctgctgcagctttttctgcctgtgcctgtttttcttcaagcacctcacattttacttcttcaccgactactttttcaatttcagatacagactgggctgcctgtaaaatcttgtcgtaaggttcttctgacgtgatgaaaaaactgaaatcattatcaaaatgctcatcttcgatttcctgtgaagttggattgtatacaatgatttctccaaattcctctactgccttgaatactaagaatgcacgagcagcttttaacagacattctttctgaatatatacggtcattccataaatatgtaaaccattgttttctgcctcttttaactttgtgcggtctgaactgttcagttcaaattcaaaatatttcttttcaccgttcttagccgcatcatctgtattttctttcttaggagccggagctgcttcctctttcttctccgcattctcctcaccggcgataaaatcattcagttctttaatgatcagctcgttgtcttccgttccctcatcggaacttgcctttacattgttcagataactctcgatcgcatccagacatttaaagagcaggtcgatcatattactgttaactttaactttatcacttctgacttcctgaaaaacattttccatatcatgggtcagtcgctgcatgcgcttaaatcccatggtacctgccataccctttaaggaatgggctgcgcggaaaatttcatttatagtatccatattttccggttctttttcaagttccataatgcagtcacttaaagtctgcagatgttcttctgtttcatcaataaaaatttcaaggtattggcttacatccatattactgtacccccacattctttgttattgtttgagcaacctgtgtaagaggaaccacttcatttaccagtccggtttcagcaatcgacttaggcattccgtataccacacaagtctcggcattctgcgatatcacatataccggcttactctttgctaaggattttattcccttggtaccatctgctcccataccggtcagtacaacacacactatctgatcatatccacaggttcgcaacgaatcataagtaatgtctgcacacggttttaatccgccgataggaggcaattcatcattgagtctgattttatggcttccgtcaggacttttctttatttccatatgctttccgccgggagcaatatatatcgttccctttttgagcacatctccatcttccgcctctttgacatgtatgtcactgacttcgttaagtctgtctgccatggattttgtaaatcctgcaggcatatgctgcactaaaaccatcggtgcatccagatttttgggaagatatggaatcacactctgaagagctttcggacctcccgtcgaacatgccaatgcaactaatttatttctgcttcgaaccggctccgtgtttctgcgcaagactactttttccggtgtttcagccgatttgctgcccaaagccatcttctgtgtttttaaaactgcattcagcactccaagaagtttacccttaaatgcttcaccttttgcctcgatcacattcgtcggcttcggcacaaaatcaactgccccccgttccatggcaagcatggtaacttcggcatcctttgtagtcgtagtactgaccataatgaccgttgcacggattctttctttttgaagctgctctaataaagctagtccatccatccgcggcatattaacatccaacaccacgccgtcatatctttttgcccttaatttttcaagtgcatccagaccgtctctgcaggtatcgattgcctgaaatgtttcatctgaattaataatatcacagatcacccttctcatgagtgcagagtcatcaacaaccagaatattttttttcatttttttatcctctcactgctattctgctgacgcattcttctctcttcttcgaagatgtaacggataatttcttcccttacccgatcattcttgatactgaattttgcacgcgacataaacctgtattctgccgctgattctattttacttgtttcaatcacatttgcaacaatataatactgattatccattgtctggcttttcagtcttaactccactaagatccatgtacccggtttctgttcctgttcagttgtaaaacggattcctccgccacttaaatccatgatttttccttttcgttctttttcataaaaatgttcatcacggatttccgaaaaaatagcatccacactgtcaagcatggcctgttctgctgtcagttcataatatttaaaatccagaagacacggatatctgaaatattctcttcgctgaaacttttccggctgagatttcaattccatctcaagcatatatatattatcttttttataccgctccttaacctgaccaactgcccgatacaatgactcgcgtgagaaaaatacaagttcataacgaactccaagctgtaacagcaccagtttgccagcctccatcggcatggctatttccatatttccattcgagcggaaatcaagcaccttacttttatatgttttcactgtgacgtccgttttttctgcctgttcaacttcctgaagaacacggatatctatcttatcgccgatacgtataatgtctgaaaccttcatatccattcctccttagtatttctgttgccaaaaatttgaaaacattctggcaatccccaaccgtttatccggtaatttttcttcctgtaaaatcagatttgaagccataacttcaaacgctcttgccgacttcgccaacggtgcattcaacgaaacaggtttctgctgtcttaccgaacgttcgagcatgtgatcctgcgggatcattccaagataatttacagaaccatccagaaactgttctaccacagaattcagtttttcatatacctgctgcccttcttcactggatatcacccggtttgacacaatccggatatctgtctgttcgcgtgaaaataaaggattatgatacaatgctttcaataatgaataggaatctgtcaaagaactcggttccggcgtcgtaacaacaagtacttccggacttgccattacaaattccataacctggtttgaaattcctgcccctgtatcaatcaggatcacatctgcataccgatctaattcagccagaccgcgaaccagatatctgatctgttcatccgcaagctggttcatactcaagattcctgctccgccagagataaaccctattcccataggaccttctgttataatctccgtcatgctttttccctggaacagaaaatctcccagattataacgtggaactgcgccaaacataacttcaacattggcaagaccaaaatcagcatcaaaaatcaggactttttttcccattttactgatctgcacagcaagatttactgcaacatttgactttccaactccgccttttccactcgtcacggtaatcacgcgtgcatccagtttccggctctgattttttactttaattacatttctgagattttgagcctgatccatatcattatctgcctcccagaagttgttttactattttttgtgtattaaattcctctatgtcatccggtacattttgtccgtttgtcatataggaaagtggtgctcccgaatacatcttgatattgtaaatattaccatacgcttccgtttcatcaagctttgtaaatatcagtttataatcggcaatctccttatagcggtcagcaatttccaaaagatctttatacttggttgttgcactgactaccagatatacctctctttcatatgctgcatccagacctgcaagcatttttttcatatcattgcactgttcatcattcttatgggaaaaacctgccgtatcaacaaaaataagatcatactcactgactctttcgattgcagcattcatttcctctgctgagtatatgatactcattggtgcatctaaaatatttgcatacacacgaagctgttccgtagccgcaatacgataagtatccgccgtcaggaacgcaatcttcattcccatttccagtttgtacttggacgcaatcttagcaatcgtagttgtttttccgacgcccgtcggacccacaaagaaaataattcttggttttttcccggaaacacaaattgtatccggctgtcccagttttaagatcattttctgatatacatttgacaatatcgcatccacactgcttccactgtgcatgactttctctgcttcgtctaagatctggttgacatatttttcattcacttcattttccagcagcgttctgtaaagcatcttgataaactgcagtccctccggatttacaacctgacgttctttctcttcttcctttacttccttctgtctgctttcttctacggacagttgtttttccagaatattcgaaagattttccagtcttttctctaatccgtcttttgcgtgcagttccggcacattcgtaagatgtcctgacaggatgtcggatgttctgtcatttgaaaattcttttggactgatattttcatccgctgccagattcaatgtttttacagttttcgctgtcagatcagcaacctgtctcggatctacaaaactctctttttcttctcttgcagctgtaacctcaaacacagaactcttccaggctttaaacatacctgtcggtttgatttcctttacattcatcacaaccgcgccttcaccaagctcctgttttgctttttcgattgcctcttcttttgtttttccctgatacttatttatggtcattttacttgtcaccgtccctgctgattatacctactgactgtaattctacattagactcaatttcattgtaggaaactacaatcaggtccttaaaataatcttccgttaattttttaaagtacattcgaacaattggagatgtaatcacaattggtgtttttcccatgttttcgagctttgttacttcattctgtacagaattcataatagcctttgttgtttccggatcaagtgtaagatatgccccctgttctgtctgcttcacagaagccataatttcctgttccaccttcggatcaagtgtaataacactggttgtctcattcgccgggaaatacttgctggaaatggctctctttaaactctggcgcacgtactccgtcagtacatctgtatctcttgttgtcgctgcatgatctgcaagcgtttcaaaaatcgtcaggagatcacggatggaaattccctcatccagcaggttctgtaacaccttctgaacctcaccaagtccaagcattttgggaatcagctcgtccaccagtaccggattgctctctttcagattattgacaagattctgcacatcctgtctggtaagcagttctgcgatatgtgatcggatcacctctgtcaaatgcgttgcaataattgatggcggatcaacaaccgtatatccaaggctctccgcacgttcacgctggctttccgtaatccagatcgccgggagatggaatgacggttcaaatgtagggatacctgtgatctcttcctccacatatcccggattcattgccatatagtgatcaaaaaggatctctccttctgtcacctgcactcctttgatcttaatgatatactgattcggatttaactgaatattatccctcaaacgtatgataggtactatagtaccaagttcaagagcaatctgccttcgtatcataacaacacgatccaggagatctcctccctgatttacatctgctaacggaatgataccatatccaaattcaagttcaatcggatcaacctgaagcagcgacaccacattctccggttttcgtacctcttctgcttccgtttcctccgcattgacctcttcttctatactctcaataccgatatttttgtcgacctgtcgtcctgcaataataaaagttgcaccaaacgcaagaaacaataaggtatttaacggtgttgcaattcctaaaaccgccagcgtagtacctacaatataaagtacttttggaataccaaataactgactgacaaggatattggaaaaatccgcttctttcgacgcctttgtaacaagaataccggttgcaagtgagatcagaagggacggtatctgggaagaaagtccatcaccaatcgttagcacaccgtaatgttcgattgcctcctgaaacgtcattccgccccgcagtatacccataatggttccacccgcaaggtttacaaacgtgataataagaccagctgctgcatctccctttacatacttggtagcaccatccatggaaccaaagaacgcagattcttcctgaatcttatttctccgctcccttgcctgtttttccgtgatcgctccggtatttaaatccgcatcaatcgccatctgcttaccaggcatcgcatcaagggtaaatctcgccgttacctcagcgacacgctcggaacctttattgataacaacaaactggataataaccagaataatgaatacgatggcaccaacgatcagatctccaccaccgacgaactgtccaaatgtctgtacgacattacccggattaccggttgttaagatcagtcgtgttgaagacacgttcagggaaattcgaaagattgtcgtaaacaaaagtaaagtcggaaaaaaagacatatccagtacttcttttacaaacaatgtattaaaaagaacaatcaatgcgattgaaatgttcagtgccagcataacgtcgagtaaattggaactgattggcactataaaaaagatgactgcagccagtagatacagtgcaacacctatgtcagctttcttcatgacctctcctccctgtttctcagattatataccatagcaagaatttccgctactgcctgatacaattccggcggtatttctgcccctatatctacattcgcatataacattcttgccaacggtttattttcaacaatttcaatgtggttttcctttgctttttcacgaattttctgtgcaagataatcttctccttttgcaataacgatcggagctcttgacacctcggcatcatatttgattgcaactgccaggtgtgtcgggttcgtaataaccacatctgcctttggtacatcctgcatcatacgcctttgagaagcttctctcatacgttgtctctgtcttcctttgatctcaggatttccctcagtatttttatactcatcctttaattcctgcttggtcatcttcatatcttcattgaaacgatgtttctgataaacaaaatctgcaattccgaccaccagataaacaaggctgattttaaaacctgcattaatgataacattcccgcataatacaactgcctgattcagcggtatgtcatataaaataaaaatatcatttgcctcaccctttatggatgtataagcaacatatatgatcaaacttatttttaaaatagatttaagcagctcaaataatgaatcttttgaaaaaatacgtttaaatccattgatcggattaaatttatcccccttaggttttaacggcttagccgtgactttccaccctacctgaaggatacttacaagggctgtcaccgcaacaccaaacacaaaaaacggggcagccatcttgaacatttctatatacacattatgtaaaaacgaagtaatctcctttgtagatgattccatcgcattaacacttacaaaatcaggcatcagcttatatacataataaaaaacttccaaaaagccattgccaattaacgaaataaaaaccttcaacacgaggaacaatactatcagatcaaatgctgcggtaagttccttactctttgcaaccttaccatcctctcgtgcttctcttaacttcttttctgttgccggctctgttttttcccctccgggtccatcttttgcgaaccactgaaggtcatatgcaaatagtaatctgtctttccattccaccttagtacattccctctataaataaaaccatcatctttttcatttcggtaaatataaaactggcgattccaggcaaaagtgaaattgtaagaaataaaactccaaaaccaaccagtattttcatctgcataccaactgcaaacatattcatctgtggtgcaacctttgccagaataccaagaatacagtttaaaatcatcatacaggcaaatattggaagaaagatcctgaaacctattacaaacagatctgtcatatactgtgttatagaacccgcaagtgaatcccagttaaagatctgaccattgattgggattacggtaaaagaatctaccacagcctgtaaaatcacatgatgcatatctgttgcaatcaaaagaagaagtataaaataattgtacaggtttccggtaattgttacctgcgtattcattgtcgggtcaaattcagtcaccatggataatccaatatccatatcaataatatttcccgcaaataaaataatggaattacaaatgtttgcagcaaaccctatcagcaaccctgtaattccttcttttaacactattatcgcatacccaatcaaacctgtatactcgattgctgtcttatcaacaaaaccatacaccagaagtgcaacaaaaaaagaaaaacctatctttgcctgcgagggcgcattttttgttccaaaaaaaggtgcaatatagacaaaacaggatatgcgaaccaatattaatatcagtatttcaaaattagccaatgaaaacgtatattctaacatagatcgtcctaaccgagatacatactaaaattcgaccataatgtcgtcacgaattctgtcagatttgtcaaaatccatgatccaaaaatcataagtccgacaaatactgcaataattttaggaacaaacgtcagcgtctgctcctgaatagatgtaaccgtctggaaaatactgacaatcaaaccaacaaccagtgaaatgatcaacattggagccgaacagattataatcgtataaattgcttcttttgctacatcaagtacctgtccttctgtcattttgttctcacctctttgctatctatatacattttaatctgtatctataacagaatgcacattcttcgaacattctgttatcatcaataaaacgtctttactacgcttcctattacaagattccatccatccgccagtataaacagtaatattttaaacggcaaagagattgttgtcggtggaagcatcatcatacccatcgacataagcacggatgcaactaccatatcaattacaataaacgggatataaattacaaatcccatgataaatgcctgtctcagttccccgattataaacgatggaatcataattgtcatcggaatcgcatcatatgcactctgcccggattcctcatattccttttccagtgcagcactgtcaatatcataactgtcaccagccatatccacgaaaagcttgacatcctttcgctgtacctgtccatacataaactggcgaattggcacttccgcttcttttaatgccttttctatggtaatatctccattatccagtggctggattgcattctcattgatctgctgaaacgtcggccacatgataaaaaatgtcaaaaacaatgccagtccaatcaaaatctggtttggcggtgccgtctgtgttccaattgccgttcttaaaaaatgaagtacaattacaattctggtatacgatgtaagcataatcaaaagcgatggtgacactgcaataattgtcagtaacaataatgcacgtacttctgaagcaacccccgcctcatcattatttatcgagatggacagaccacctttgctgtctgactcactacctgaacctgtgctggtattcgctgctgtattatccagcgaatcaatgctgtccggatccatggaagctgcataaacagtcgttctgttttgtgaggcaaacaacactgccacaaacactgctattgcaaatattaatgacagtatacaatatgtcttttttaattttgtcataattctatcaatcctgctttttcggaaaatgatctttcagtctactaaatatctcctgaaaattttcctgtgaatttttcatatcatccgatgtctggactgataactgatcttctgtaagttccgcaatttttgttacttcatccttacccacagcgattacaaaatactgttctcctgccttaacaagctgtaaaaatttaccatttgcaatccggattgtttcgagaaccataagatttcctttggacatttgtattttttgaaaaccacctacccactttgtcgtgaagtaggtaataatcaaaacaaacacaaatatgatcagtactccaatcagctgcatcagacttcgaaaagaggcgcttaataaaatcatactaacccactactttttttactgcctcaagtacacgctcagcctggaatggcttcacaataaaatcctttgctcctgactgaatcgcttcaataaccattgcctgctgtcccattgcagaacacatgataatatttgcattcggatcgatctctttgatttttttaagtgcctggataccatccatatccggcatagtaatatccattaataccagatccggttttgcttcaggatatttttccactgcaatagcaccattttcagcctccgctgcaatctcataaccattctttgtaagaatgtccttaatcatcattctcataaatgcagcatcatcacaaatcataaccttagccataattttctctcctatctttaactcttcttttttgttttttattttataatttcagtaattcgtataccatagctttcttctattactactacctcgcctttggctacgaatttaccatttaccagaacatcaatcggttctccggcaatcctgtttaattctataatggttcccggtgtaaaatcaagtatttctttaattgatttggaagttcttccaagttctaccgtaacttcaagtggtacatccataatcaaatcaatattttccggttgaaaattccccggtactgctccagtaaatgcctggaattgtgccggctgtacatttacctgctgttgtccatacatctgcgacatctcctgacccatcattgattgtcccatcatcggctgacccatcattggctgccccatcatcggctgtcccatcattggctgctgtgctgccatctgaggttgtggctgcggtgcaggtgtcggctgagctgccggtgtactctgggtgttctctttttcactcattcctgcagtggaattactgtcttcttccatattgcttgttacatttgcacacatttcttttgcaaaagaaacaggatataactgcatgatctcactatcaacaagatcaccaatctctaaccggaatgaaatttttacaaattcacctgcaaggaactcatcaatctgactctcatcaattgtctgttgcaaatctatcagatctgcacttggcgggctgatatcaattaccttgttcagcatggaagacaatgatgttgctgccgagcccatcatctggttcattgcctcgctgattgcactcaggtgaagttctccaagttctccatccgtatttgttccatcaccgcccatcatcaggtccgtgataacttttacatcatgttcctttaacacaaggatattgcttccatctaatcccacggtatacgcaattcgtataaatacacatggcttttcatatgcgtcacatatatcactccagtttgcaaacgcaaccactggggtggaaatctcaaccttacggtttaccagtgaaaacagtgtagttgccgctgttcccatactgatattcgagatctcaccgatcgcatctttttcctgttctgtcaatgtattttccggattttcatctgtacctgaaggattgttcagtaaagcattgatttcttcctgtgacatcgttccatccatcttactgctcctccctaatcactgatgtaattcttactgcatagtcatcaccggtttctcccggcagagcagtaaatttttttatacttccaacaaagacactcagttcctgatcaaccttcgtatccagccggataatatctcctacctgcagtcccaaaaaatcatttactgaaatggaactgttaccaagtacagctttgatcggcattggtgcttttgaaataagtgcctcgatcgtttctgtatactgttgttcatctttttcctgcagactcgaataccagtatttggtattcagtttgtccataatactctctaaagtcagatatggaaggcatacattcagtaatccctccacatcgccaatcttaacattgagcgttaccagagctatcatctccgtcggcgatataatctgtgcgaactgcgaattcgtctcaatacgctctaaccggggttctaactcacatacattctcccacggctccactaaaagatctactgccacattaaatatccgctcaatgatcagcaattctatctccgagaaatccctcggtttatccagaggcactccctttccacctaacattctgtctactacaacatatccaagattttgtgccatctcaatgacaatgcttccattcaatggagatgcatttacaattccaagtaatacaggattcgataacgcatttgaaaattctgaatatgtaactgcttctgagttcatcacctcaacctgaacatttttccgtaaataaacaggaagattggttgacaagagtcttccgtaatgttcaaagataatctccagcgttcgcagatgttcctttgaaaactttgcaggacgggcaaaatcataatttttgacctgttttttatcttcatctttcatttcatctacatcaagttcaccactgcttaacgctttgagcaaactatctatctcattttgagataagacttcacccattctttctcaccacctaacacaatatttgggtctattccgtctgaacgcttgagaagtttacaccaacgatgaagtctgaacctccaaacatatcctgcattgattttaatatatcgtcttttacattctgatagccatttgcatcaaactcatctaatgtatatccatttacgatcgtgttgatctcactctggataattgtttcttttgcagcaagcccttccgatcccccataagtcttatatccgtcactcttggtattcaaagacagactgactgaaaatacagcatagtgttgtttgccatcatcgctctgttttaaattcacggtaaatccatcagtgatcgcataagtctcaacatcttcaatcggcacctccggtgtagccggcgtattttctccactctgaagttccagattaatagcagagcatacctgatcgatcagctgattcgatttttttgtctgcggaataatcgtgaacacaagaattgcagttaaaataagatttgctaaaaccagtgccagaataattacggttatcaaattctttttcataatgctaccttcctgttcaattaaaatctgaactataagaattatatatttttataataacgcggcggtttcttgctcttccctcctgcgttgtattatctgcaacaggtacatactcacctcttccagatgccttcaaatgtgcgggctccactgttgtaatatctctcaagtaatctgtaaccgcccgtgccctgtaaaatgaaagcacatcattatcttcatattttgcagaatgaatcggcacgttatccgtgtgtccctctacttctatgatattatcctgataaggttcgatcagcttacccagcttatcaatcagcggatacgcctctgatcggatttcagcatgcccggagtcaaacaaaagagctccattcatattgagcatgacatactgtgcattgaaatcaacttccacctgatcctggattccatatcttgcaatggcatcctccagctgttcagacattttttctgattcttccagtgcctgttctttatattcttccactacatcattctcttcgtctgtttcctgatccgtttcagagttcgctttgtctttataataagaatctaacatttcaagctggctcacaccggatgatatcagagttccatctccaatagaagatcctccattgggaagaatactaaatgtattctgaaaggaagccaccattttttcaaacttttctgcatctaccgttgacatagagaataacaatacaaagaaacataacagtaggttcatcagatctgcaaatgtattcatccatgccggtgatccttttggttcatcaggctttcttttcactattcttcacctccagcctcgctttcctgcgctgtattacgcgccgaaggtgcaaggaatgatttcagtttttcttctataacacgtggattttctcctgcctggatcgacagaataccttccacggaaatttccttcatcatcatttcattatcattattcagttttaacttacctgcaatcgggttacataaccagtttgcaagtaatgaaccatacaatgttgtaacaagcgccgttgccatcgccggtccgattgtggatgcatcttccatgttcttcaacatgaggatcaatccaatcagtgtaccgatcataccccaggcaggacctaattcagcccatttctcccagacagcaattttagctttatgtctgctctcaacgcaggctaagtcagtctccatgattcctcttaccagttccggatctgtaccatctacaacaagcataattccttttttcagaaaatcatcttcaatcccgtttgctgcttcttccaatgccagaagtccttcttttctcgcagtattcgacagtgagataatctggttgatgacaactgccggatcctgaacctcatccttaaaaatcagctttattgactttataccattgataaaatctgccaatttaaaagatgcgagcgtacctgcaatggaacctcctattgtaataatgaatgatgccgtatcccacatggagtgtaaacttgcaacacctccgttggaaagtacaccaaacacaaacattacaacgcctaataacatacctactattgatgctatatccactttttccacctaccatccttgatttttcagattataaaatcccatccgtgggacttattcttctcttaaaaggccatttgtaaaaatatcccttttgtatgattttactaaatttttgacctcttgtctactttcttttacaataaactttttacctgttgtaagagaaataactgtgtccggagtttcctccaccgtttcaatcagatccgaattgattaatactgttgttccattcagccgtgtcacttcgatcatatcgtaatcattcctccattgccagtcaacagatttttattgtgaccggtctgttttgaaaccggccacaatgttcagtataacatatgtaactgcctgtgtaaaacctgtttcgacattttaggacaggttttacataaatattattttttttacattacattaacgtttcaggttaaccagttcctctaagagggtatctgatgttgtgatgatacgggagtttgcctggaaaccacgctgtgtgatgatcatctgtgtgaactccgtggacaagtctacgttagacatttcaagttctccggatgtcatggaacttccgtccgcagaaatctcaacaccaattccatcaaattcacctgagtttaaggttgtacggtaacagttctctccaaccttttcaagaccggatgcatttgcaaactgtgcaacagcgatctgtccaagtatctctgtattaccattatcataggtacctttgataagaccattgttatcgatggaaataccgatcatggcacctaatttctttccttttcctgtcacaccatcatctatagatcctgtagacataaccgctgtggatttaccaccgttgtctgcatctttcagtcccgaaaaatcaatggtaatatcatcaaactgggtcggattatttcccagcttactcatattaagtgtaacagaatttgtcttattgttggatgttcttgctccaacacctgtaaacgtaccatcttttgtgctgaagtcgatcgcgtaatcagttacatctccggaaatcgtcagtgttccatttgcgattgcagccgttgcctgaccgcctccaatctttgaaaccattgcatctgaaattccgtatacctgtttcaggctgtgtgtagttgctggagtttttccatccgtaaaagaatttgttgccagatcccaagagatttctgtaccagttgcatcacttcctacatagaatttatctttagcagaatcatagtaataaccactctgaacctggctgtatgttccaagtgtagcattcgttgtttttgctccaaatatatcactcagatcaactttgctggtttccggatcatagaatgttgttccatcactatttaaaatcttttccagttccaccgtatattttccatctgttccggtagatttcattgcaaaacgcgctgtataggaataaccgagattatcaaaaaatgtcagtgttttgacaagtccgttgtctgacaatacatccttatcatttttatcaataataccggaaacatttgcctgtgtggttgcctccggagcagatgtcaggttggatgtctgcatgacacgaagtgcagatacggtatccttcttgatatttcctgttgtcggatctacctgccatcccataactgtataaccggtggatgtcatacataagttaccggcaccatctacatagaaagaaccggctctggtaaacaggttctcagaaccgttgttaactacaaaaaagtttgtcgtagactggtctgataaacggatatcgaatgcacgtccggttgtttcagccgcaccggaagttgtgatgcttaagtttgttgcaccggtcgtaacaccaagaccgatctgttttgcattcacaccaccggtacctgttgctgcgttcgcaccggatgcattacttgtcatctgatataaaacatcctgaaatacaactgaggatgatttaaaagctactgtgtttacgttggcgatattgttaccaataacgtccatttttgtctgatgtgtcttaagacctgacacagcagagtacattgatctcatcatagttgaaattgacctcctaagttcttttgtgctgccttcccttctgtcattccgggaatctagcctccatttcggtccggctacgtgatcacagcaccatcaatattggtataaatattatcatcggactctgtccggtccattgctgtaacgactgtcctgttcggaacatttacgataaaagcgagtgaatcaacaattactaacgattctctgattcccttttcaccagccttaaaaacgcctgtctcaagtcgttcattctgctctttggacaaattgatattacgatccatcaggcgcatcgtggcatgcttggaaaatttaagtgtcccacctgcttttgcatcctgcttctgctttaaaatatcttcaaaggagacaccactcgaagttaccgcatccgtgcttttccgagtcagatactggtcagttacctgctcaatggaagcaaactggttactgatcttattcataatcgcatttcccttctgtcagatatcaggttttatctgtacctgtcgttgtgtctgtatccgtttttgtatctgttcctgttgtcgtatctgttgttgtacctgtcgatgatgaagtacttttataccagtcttttcctgcaagtttttccatctgtgcaagcagttcctgatattttttcaaagtatctgtatcgatctttgactgctgataagaattcagattatcataatatgtctttaaattcttgacatcatccttgtcacttaatgtaagctgtgctgcggatggcaatttagcaaccgctgctgcaaacgtcttagcaagtgtctctgcctccatgtattcggtatctgcaacctgatatacatcagaaagtgaatataacaccccatttacacagatcttctgctcaccgttttctttctgtacataatcaacaaatccctgtgttgctgttgtttctccagtcgaagatgttgtcttgataataacatattttccaacaagtgcatttgcattgctgctctcgattgtactctgcataccaagtgttgcttccatctgtgaaaatgtagcaagctgtgcaacatactccgtattgctggtaggctctaacggatcctgatactgcatctctgcacataacagctgtaagaactggtcatagccaaggtcattgctggtatccgatttgcttgtagtactggtatcctttggtatttttccgtcttcaacgggctgaattaatgccatttttttctcctttcttttgttttaagcagtataatctacggaattaccgtgatctgccataatctgcgccacaagggcttcttcctcactcatgactccggagagttcatctaactcatctaagttgattcttctagtctttggcgaagctttttcctgctcctctgcctgtctctcttcctgttttgcattctgctctaagtttttttcaaactcatggcttccaaccgtaacttctacggcatccaccttcacacctgcctggttcatactctgtttgagttctgccatctgcgcttctaacgcttcttttaccagttcgttctgtgtcataatatgagcagatacatttccttccttggtcgttacttcgatataaatcttgccaaggtgttccgggttcaactgcatctccatcgtcgtctgtgcttcacggacagtgatttttgtaaattctgttacctgacggatcagatctaaagtgtcaagctgtcttgaaaattccggcacattttccggtgtttttactgctgccggatctgccacatgttcctgattcacaaatgctgtctgacccgatgcattcccagattcatttttactgcctgtctgctgtcccttatctgactctgtctttacatccggttcttctgttttctccggcatcagaccatcattcacgtcatcggtatccttcacattatctgcgacttctttctgcagaacaatgttgtcctccggcttctgtgtttccacttcatctgcatttaaaactgtctgtactgttttatcatcttttgcatctgaaatcatctgctccggcacagcatctgctgccgtctgtactgcgttgtcattttccggcacctgaatatccgccggtaactgctctgcattcacatttgtgtctgttgcagcagccatctcagtaaacatctgcggtgtcattccaagttcatctaacaggttctgtgacaactctccaatttcatttacaatttccataaatgaactgttgcacagcagttctccaacattttcacatcctgtgagttcagctgtaagctgcgcaagctgattcggctgtatcagatctgcaacagtaagtcctaacttctgcatggcatctgcgatttcttcatctgtcacaccaagtttatctttcaaaacctgtctcacatcctcatcaaatgcagctaacttttcatccgcattttctgattgaatgtccgttttgcctgctgaattatcttttatactgcccgcagcattctgataacgttcataatcatctgccacactactgtttccggttacagctgccacatcctgtctgctgttctgtccaccataattgtaaccgcctccaacctgggttgtcatctggctcatcacttctgcaaactgaactttcagatcgccttcttttgttccggtcagtgtctggccgccctgtcctatggacataattccagccacttctgaaacgcgcgtgcttcccatgtttcttcctcctttccctttcgctgcatgtactgccgcttaatgatctattctgaaggtttcatgatctctgttacctttgcagcggtatcagaagtcattttaccaagaatagcagctcttgaatctgcatccataccatctaaaatctgtgcaaccagtttcaggttgtctgtcatggtatcaaaaattgctgctgcctcttttggcttcatggatgaatatgttttgatgtaatcatcaagctgctcatcctctgccgtctgtgccactacctgcttatacagtacttctgcatttgcaggatcgatgctttcgtaatatttcttatattcctcaatatccggggctacatcagaaaagacaacatcctcatagaagctctgcttttccttttcaaattctgcctcgttttccttatattgctgtaattcctgtgattgagcttctaactggctgatataatccgcatttgcagacgatgcattctgtgcatctgccagttctttttcaagttctttaatgcgctcaaccgcatctgccatcgtatcatacgcataagcactgtcctctgttgaaacctgttccaccgcatcatccggtaaaatcttatttacataagggacatctttcaggatcggtgcaagcacgcctgatccaaatcctccaacatcccatttaatcagaagggcaataattgcaaaccatacaactatgatcagaagggaaacaaaaaataccgcaactttgctgccgccgctttcttcttcaagttcatcgctctctgctgcatgctgtgctttcttctgctttgcctcttctttttttctttgtttttcttcagcttttttatctacaacttcttctttttcttctgccatattttcctcctgtccgctcaaactgcctaactacgctgtccattatcgtgataggtataactgacaagctcatctatttcttttgactcttcatgtaaaagttcctgtttaaactcctcaaaagctttttctttcagtttttcatgtgtcttgcgttcaaccattgcttcattcaactgttttctcgccaattcaacatcacgttctgcagcatgtacattcatcatctggctgcgctgtttgctttttaagacgtcaatcgccttcctgcattcacgaatttccaaaacattaatactgccactcaccaattctcttgcttttgattcataaccggctctccggatcaggatatcctgaagtttctgctgttctgccgcaagttttgcattcgccataccataggctgtctttgcctgattttccattttttctttgatatcaagaatgttctgcattctgtatctgaactttgccataccagaaacctttcttagttttcaaacagttttcgcagcaggtcaatctcttcgttgaattcaaatttttcatcggtcttttgcatcaggaactcatttaccgcttgaattttttgaattgcataatcaatttcacgattggttccatttttatatgccccgatattaatcaggtcttctgcctcattataagtagccataacatttcttaattttccggcaagctctttatgctcacttgtagcaatcgaactcataacacgggaaatactctgtaatacatcaattgcaggataatgattcttttgtcctaattttctggacaacataatatgtccgtctaaaatacttctcgccgtatctgtgattggttcattcatatcatcaccatctacaagcacggtgtaaagtccggtaatagatcccttatccgaagttcctgcacgttccagaagtttaggcatttctgaatacacacttggtggatatcctcttgttaccggtggctctccggatgccaacccaatctcccgctgtgccatagaaaatcgtgtcagtgaatccatcatcagcaacacatctttcccctgatctctaaagtattcagcaatagctgttgctgtttttgcagctttatttcttatcaatgcaggtttatcggatgtcgcaacaataaccacggagcgtttcatgccttcttcaccaagatcgcgttccacaaactctcttacttctcttccacgctcgccaatcaatgcaatcacgttgatatccgcttttgtatttctcgcaaacataccaagtaatgtactttttccaacaccggatccggcgaaaataccgattctctgtccttttcctactgtaatcagaccatctactgctttcacacccaaaggtagtacttcatcaataatttttcttgccatcggatctggtggcaatgcttcaaccggataatcatacggaagtaataattcttccacatcggttggccgtcctattccatctaatgtatgacctaacagttcttctccaacttttaccgtcagaggatgtcctgtattttctacaatacatccaacaccaattccttctacgctttcaaacggcatcaggagtaaatgtttatcacggaaaccgacgacttcagccatcgttgaaatattttgttcccgatcgataatgatacggcacagatcattcagttttgcatttggtcctacagattcaattgtaagaccgacaatctttgtcaccttgcctaaacggttaaaatacgtcttatcggcaagctgaagatatttatcaaatgtacccattctgccgcctcacctctatgagcataatgctttgatatccttcatcagattatcaagctgtacgtctacaccacagtcaaatattcctgcgtcagtctctatggtgcacgcattttcattcagtgtataatcaggaacaatttcaagttctatgtcatgtccgacataatctaatatttcatctttatgcttttctaaaaatgacacattgtctcctgcaaccttaatccggaaatgcttttcatcttcgatatttgcgatagcattatcgatcagatgaagcaggatttctttcttatcatcaaactggatatgaaaaaccttattaaaaacatttaatatcacatctaccagttctttttccatgtttttttgtttttcctgataagaattctgcaactgtatttttttctgctgttgttcctgttctaactgctgttttttctggttatactcctgttctaatgtattctgtccttccagataaccctgtttttttgcttcatcacggatagcttccgcttcctgtcttgcatcatcaatcagcacatctgcctgtgctcttgcctgcgaaagtatctgctccgctttttcattcacagcaatcatatcctgttccggttcttctacagggattacattctctgttttgtcagtaataatcccctccgcaaatccatccggtcctacaggccggtcttgttttaccatctgttgtttcaggaactcctgtatatgatcatttgaatcgatcacccttgtattctgactctctgtatgcacgaaccacggtttataaagattagacaacgatctcgtcacctccgcctctggagattacaatctctccagaatcctctaatttacgaatgacactgacaactttctgctgagcctcctcaacatctttcatacggacaggtcccataaactccatatcctctttgatcattgcagccagtcgttttgaaagattcttaaagataacgttctgtacttcttcgtttgcagcctttaaggcaactccaaggtcagcattatcgacatcacgaagcactctctggattgcacggtcgtcaagcagcagaatatcttcgaatacgaacatcttcttgcggatctcgtctgccaactctggttcttcgatctccaaagactccataatatgtttttctgtcgtacgatctactgtatttaagatatttacgattgcatccacaccaccgacaattgtgtaatcctggttgacaagggaagaaagtttcttttccagcacacgttccacctctttgatcacatccggagatgtacgatccatcattgcaatacgttttgcaacatctgcctgtttttccggcggaagtgctccaatcacaagtgcagcctgggctgatgtcagatacgacaagatcattgcgattgtctgtggatgttcatcctgaataaagttcaataactggcttggatctgtttttcgaacaaattcaaatggacgtacctgcagggacgctgtaagttttgtgataacttcctttgccctgtcctcaccaagagccttatccagcagctcttttgcatatccaataccgccttctgcaatatactgctgtgccaaacagatctgataaaattcatttaaaacatcttccttaacctgtggtgaaacacttctggtgttcgcgatctcaagtgtcagttcttcaatttcatcttcttttaaatgcttaaagatatctgcagaccgctccggtcccaaagcaatcaaaaggattgctgccttttgtattccagtataatcttgtgtgttcgttgccataccttattcccactcctcgttcagccagttgcgtaataatgaagctgccgcttccggattgtcttccacaaatttttcaatcaggatacgggtttcagatttttcattgtatccgatatcctgcatttcttcctggctttcttttgttgattcaagcagactttcaacagaaagttccggctcgatctctgccactttttcttttctggtactgcggaacaccacataacccaaaagaagaaggatcagtaccacaagtacaatctgtaaataatcagaagcacttcttccaccggaagaatactggaaaaccggttcctcctgtgcaatgatggtaatcttatctgtcgggattcctgttgcattcgaaatcatcgtgatatattccggatcgacagtaatcgctgtcgggtcactgtttgccgcaacatattcgtcgaacgtcatgttgtcaagtgctccggatgcacgcagtgtatcttcatcgtaaatgcggtatttcgttgctaccagagaaacggaagagtctgcataattaacagttccgccatttgatgactttttcgttaccttttcattgttctggtagtttgtggttgtatctgtaacagtactgtgtgtgtaattgttatcttcaatcacataagacgtatcatcattcgaatctgttccaggtgttgcagctgcaccaccttctgattctgattcgtattcactcttactgccaaccataccattcgtctgtccgtccggtgcataatattcatgcgttgcttcttctgacgtatcgaaatccatcacaagttccggtgccacttccacatggtcaaacaaagaagaacccaccataacatctttcactttactctttaccaggttttctgcttttgattttacagagagctggctgtttgcagttcccacattggtatcagaagagtctcctgagaataagacattcgaattagaatctaaaatctgaatattatctgtatttttatttccaagctgtgttgctatgtattttgcaagacctgctgcctgatcctcatccatatctccgtttaaagtaagaatcactgctgcataggaatcctgatcttttgcaagaattgttccatcatcatttggaatatcgagtgttacagaagcactttcaacatttgacagggtttccaactgttcagcaaaatatttctgcagataaactttgtatttctttgtcttgtctgcctctgttgaactgaatccgccatcaaaaacattatcaatggatgcgccctggctcggtatatcattttttccgagcagaatcgaagcagccgcctcatcttttgcatctacataaaagatcagtccatcctgagacatctgataagaaatgctctcgccatccagaagatccttcactgtacctgcctctgctgttgtctgacactcgtgcagtgtaaccatattgggtttactgacaaccgctgccagtattgccagcgcaacaatgatcactgcgacaatgctgatcaataacgctttctgctttgtattaaactttttccaccattctgtaatcttatttaatatattttgcacctgttccggcatgttatctgactccattcattaaatttgcatattcatgatttctttatatgcatccagcattttatcccttaccgctgttgtatactgaagtgctgtaagtgctttctttgccgcaatctgcatatcatgcggattatctgcctttccaagggcaaattctatctgggccgcttctgcatcattctgtaaatcgctcgtttctgacaatacattcatcgccgaatcaagcaccgactgaaagctgtcatccgaagtatttacaagtctgttctgttccgccaccttttcaatataatctgatgtgatccctgttaatgaagtaatatccatttaccgtcattcctttccttacttactgatattcagtgcagcctgcaccatacttttcgtcgcgtcaaatgctgttgtatttgcttcatatgctcttgttgcatcaatcaggtttgtcatttcagttaccgtattcacattcgggtatgtaacatatccattttcgtctgcatccggatgagacggatcataaaccatacgcatctctgtctcatcatcctcttttacagatgtcaccttcacgccatttccaaccgctctcgctcttgcagtctcataatactgtgaaaaaggtgtttctgtcttttctgcaaatgtaacgatctttctccgatatggtgtaccgtcttccgtcctcgttgtatttatatttgcaatattctgtgcgatcgtgtccatacgaaagcgttctgctgtcattccacttgcgctgatatcaaatgcctgaaataatcccatatactttccatcctttgttctattttcaatcttttatccgtggcagtcaaatgttcgtaaaagtatgtattctattactttagaaccgtctgcattctcgaaaaattatttgttatcgccgttgtcaaaagctgatatctcagtgattcagaagccagctccgcattttctgtgttttcatccacattattgcggtcaagtcgataagaataatttgccgcatctgtataagatgtcgttgtaagtttccccagatcctgattcagttccctcacctttttatcaaggctgctgtattttgtcttgccaagtgctttctgcaatacggactcaaagtcaacatcctgtctcttgtatccaggtgtgtctatatttgcaatattattggttatcacattctcacgcatccagcttgcatcagccgctttatcaagtatatttgtatagtcaaatacatttgttgtaaacatactgttgctcctttcatgcactattttctatattattctattttattataaaatatctcaaaaaaaacacaagagttttttatttttttt

SEQ ID NO: 5174 - DNA, 57189 bp, Unknown
  gut microbiota DNA sequence
tttccgcgtttttgcgcgcatcttcttcagatgaaacaccagcgtttccgcaaaaacatccccgaaaatgaaaatttttcaagaagatttttatcttatcattcgatttttcaaatttagggatatgaaacagcaggtttcatacaacgaatggcattcatctgtattctttccactttcaggtgtacgactcaaaaaggaatccgctatgtttaacaaataacataacaaattcctttttgttttaactattcttatgattctctttctttattttgtccagttcatcaaacacaacatcatttaatactttgatgtatgttcctttcattcccgaagatcttgattcgatcacacctgcactttcaaatttccgtagtgcatttacgattacagatcttgtaatcccaacacggtctgcaatcttgctcgcaacaaggatcccttccttgccatccatctcatcaaaaatatgtgtgattgcctctaattctgaaaaagacaatgtactgatcgcagattttacaatctgtacttttcttgtctcttctgcattttcttcatttacagaacgcatcatttcaagtccgaccaccgttgttccatattcactcagtataatgtcatctatatcatattgacggttctcgcgatatacaaataatgttcccagtcgttctcccgcaatatcaatcggtgtgatgattgctgtatatttttttacatcatccacaaatccaagtgtttcaagattcacattttcttttgtggacaggattccaagcaaacgttcatttaaaagcgggtcgataaaacctcctacctcgtccacaatcaattcattgatctcttccacaccctgaagtactcctgttccaagtacttttccttttttactgatgaccagaatatttgattccagtatttcttttaatacatcacatatatcattaaataccactttggaagaattattattgtgaagcaatttattgatttttcttgttttatctaacaactgaacactcataatacgtgcctcctgactacatatatgtctttcatgatatcttatattttatcacgttaattctgaaaattcaatattctaatatattttccataaaattatttcattattcggaatctttttcaacatttttacgatctgtcacataaccgcattgttcatctgcacatacaattttgtttcctttaatcaccatataaccgccacattttggacatttctctgcaacaggccttgaccagctcataaaatcgcattctggattatcctcacacccgaaatattttctgccttttttcgttttgcggagtacaacctccttgccgcatttcggacatgtaaccccgattttttcaagataaggttttgtattccggcattccggaaatcccgggcacgcaaggaatttaccatgcggcccatattttactaccatgttcctgccacagacatcacagataacatctgtcacttcatcttctatttttactttttccagatctttctgtgccgcttttaccgcctcatcaagatccggatagaaattacgcaccactgttttccagtttacattgccttcctcaactccatccagcagcgattccatatttgcagtaaaatgttcatctacaatacttggaaatgattccttcataatctgatttaccacttctccaagttctgtcacatataaatttttcgcttccttgacaatataacgtctgccgagcaatgttgtgatggtaggagaataggtactaggacgtccaattcccagttcctccaatgtttttaccagagatgcctctgtataatgtgccggcggctgtgtaaaatgctgtttttcatcaaactcttttaaattaagcactgtattctcatcaatagaacctaccagaacattattctctgctttttcgtcgtcatcacttgtatacaccgacataaatccgtcaaatgctattttcgatgcagacactgtaaaccggtattctcctgctccgatctttacgttcgttgtctcgtaaaccgcctgcgccattctgcttgccgtaaaacgtttccagatcaactggtaaaggcggaactgatcacgcgacaatgactcttttaccatgaccggagtacggttaatatcagatgggcggattgcctcatgtgcatcctgtattttggcaccgttctttttcgtcgttttttcgcctgcgatatagttttcaccataatttccggcaatatattcccgcgcctgtgcatctgcctcttccgaaatacgaacagaatccgtccttaagtaagtgataagaccaactgttccctgtcctttgacatcaacaccttcgtataactgctgtgcaatccgcatagtctttgaaattgggaaattaagtgccttagatgcttcctgctgcagcgtactggttgtaaatggcaatggggcctttttcacacgttctcctttttttacttctaaaacatgaaactcctctttctgcatctctgccatgatgcggtctgcctgctctttactggaaatcgtaagttttccgttctcatctccataaaattttgcgagcagtgtctttctctctccttttacagataattctgcatccagtgtccagtattcttccgggataaatgcgttaatttcatcctcacggtcacagataatgcgaagtgcaacagactggacacgcccggcgctaagtcctctttttacttttgcccacagtaacggactgatctcatatcctaccagacgatccaggattcttctggtctgctgtgcatccacaagattcatatcaatcttacggggttcttttaaggatgctttcactgcattctgtgtaatctcattaaaagtgattctctgtgcatttttatcgtctaatttcagtgcctggctcagatgccatgaaatcgcctctccctcgcggtcggggtcagttgcaagataaactttatctgctttttttgcttccttgcgcagctttgctaaaatatctccctttccgcgaatcgtaatatattttggttcaaaatcattctctatatcaattcccatctggcttttcggcagatctctcacatgtccgtttgatgctactacctcataattttttcccagaaatttttttattgtctttacctttgcgggcgactccacaataacaagatactttgccatgcatccatctccttttatttctgacaatagaccagtccgccatgcgcacaatccctattgcatctgacaacaatcctgttcttcttatacggattgtcatatctaacaatttcttttagatttttctgatataataatttttaaccgtctcggtaataaaacctttttgcagaagtctggcaagaatgtccatcatttccggcactgatataccagtcttctttaaaagctccccgacgtttttcggtcgtaaacttagacaactatacaccagtcgctcatctttttcaagtaataaatttttcaaattatcttctccggtatttatctccccctgtaattcgagttcttttaaaaattcatctacgtcagaaatgatcccggcaccctgtcttatcagattgttacacccctcactcaaagcatcatacatacgccccggcaccgcataaatatccttcccctgttctaacgcataatccgctgtaataagcgatccgctttttatttttgcctcaacgatcactaccacatcagcaagacctgcaatgatcctgtttcttgccgggaaaagtggcgcagacggatttgtacccggtggatattctgaaatgatcgcaccatttttttcaagtatctcctgatatattctgctgtttgacttcggataacagatatctaccccgcagcctaacactgcgcatgtatatccgtttttacgcagtgcacctgtatgtccactgccatcaacccctgatgccatgccgcttacaacccacgcgccagatgcagcaagccttcctgcgatcttctctgccactgatctgccataagcggaacagcggcgtgcccccacgatcgccactgtcttattattccactcctgtggaatagtcccttttacatacagactgtacggtgcatccggaatcgcggtgagacgttgtggaaatagctgttcttctctggacaaaaagaaaattcctctttccgccatgctttcgtactctgtatcataatctctttttttactctccataatccctgcagcatgcttttcttccacccctggtatcagaagaagctgtttttctgtcagtccataaacttcccgcgcacttcccgctgcaccgatcagtctgtttctggtgcgtattccaattcccggtatattagaaagccagtatgcataattgatcaatccatcccctcccagaattttttatcaatatttctgtagcaaagcgcctcgtttaaatggctcatttttatctgttcgctttcatccatatccgccagtgtacgcgccacacgcagtatcttatggtacgtgcgggcagtcagattcaatttgtcatacatttgttccatgtaaatttcctgttttttgtcaagtttacaatattcaaaaatccgcgaagacgggatatgactgttaaagcaaaaattttctccccgataccgcattttttgtatttcctgcgtgcgcacaacacgtgctcggatttcttcggatttttcactttttccggtattgtaaagatcccgaaatctgacctgtggaacttccacacaaatgtcgatccggtccaaaagcggtctgctgaccttccgcagataccggtcaatcgcagccgatgtacaggtacatctttgcatgtccggataatacccgcatttgcagggattcattgccgccacaagcataaaatcagccggatattcataacttgcattcagccttgctatacagatttttttctcctccatcggctgtcttaatatctctaaagtttcccgttgaaattctgtcagttcgtccaaaaacaggattcctttatgcgccagtgaaatttctcccggttttggcactgcaccccctcctgcaagtccctgcggtgtgatcgtgtgatgcggtgcccgaaatggtctctcccgcatcaatccttttttgtgctctaaaagcccgcagacactgtatatcttagaaagttccatgcgttcttttgtatttaacgaaggtaaaattccagggatccgctctgcgatcattgtttttcctgctcccggaggaccgacaaaaagcaggttatgcattcccgaaacagccgtttcgcaggcacgttttacaagcacctgaccgctcacatccgcaaagtccaatatcctccctgtctgcatttcttctatattatatggagtatcaaaatattctccatttccgtttaagatattcacagcatccgcaagattttttacggcaaatacctgcatgtccgataccaatgccgcctctcctgcattttcccatggaaccatacattttttcaatcctctttcttttgcctccgccaccattggcaaaattccatttaccggttgtacttttccattcagtccaacctctcccgctacaaaatattccctgaccatttcctgtctgatatacccgaatgcggtaaggactgccaccgcaaccggaaggtcaaacccggaaccggattttctgatattcgcaggcgtaaaattgatcgtaatatgctttggaggcagggcaaagccgcagtttttcaatgctgtacgcactctctctttggcttcctgcacttccgaagcaagaaatcctaccatttcaaacacaggcagaccatcactcacatctgcttccacagaaatcggtacactctggatcccgtgtatgattgccgttgatacaatactatacaacgtactcctcctttttattcatttttcctctgatttatctgatgatcacagcagaaatgctgcaactgatctgcaccagcatatgccagccggtgcatctgacaactgagcagtctgtgcccagtttcctagactttatacaaatccgaacataaggcggcgacatccgccgtcgcctaagtataacacattcatagtagcaagtacaaccttattcgcaaaaacttttttttaatttatccagcgcctttttttcaatacgcgaaacgtaagaacgcgaaattccaaccgcggaagcaatttccctctgcgtcatcgccttatttccaaataatccgtaccggtgtacaacaatatacagttcccgttcctgcagcactttcggaaccagtccaagcagcttttcaatctgtcttgtacgttccatcatctccacaacatccggctcctcactctctacaatatcaagcagatggatctggtttccctctttatccataccgatcggttcatataatgatacttcacgcgacactttcttttttgcacgaaaatacatcagaagttcattatcgatacacctggctgcataagttgccagcctgctcccgtaatcttccttgtaggttgcgatcgctttcatcagccctatcgttccgatcgagatcagatcttccatatcttcttccgaattctgatatttttttgccacatgtgcaaccagccgcatgttatgaagtgtcagttcatttcttgcttcaaggctacctttttttaattttttcaggcattcgttttcctgctctggtgtaagtggggataagaatgttttcaaaacgcaccttaaaagctttattaatacattctatgttttgaccagggtgtgcgtgcttttccccatttatttttcctaagttttattatataatgtccgtatgattcgacaattcacataccggatagaaccggaatacgactcctttaccattcgggaatacctttcattaaaaggctatcccaatgcagtatttgtacaactgaaaaaaacacccgaaagtgttctgttaaacggcatatgggcttatatgcgcacaaaattatccgccggagatgaactttttatccgcttggaagaaagcacttcctccgcgcacattttaccggtctccatgccgctttcgatctgttatgaggacgaggatatcctcgccgtaaacaagccggctcaaatgcccgttcacccttctctgaatcattacgatcatacgcttgcaaatgccgtatgcggctattacaatgaccaggagattccatatactttccgctgcgtcaaccgccttgaccgtgacacgaccggactcactctgatcgcaaagcacatgttaagttccgctattttaagtaccgcggcagccagacgtgaaatatcgagagaatacattgccattgcctccggaaaaacacccgaatccggaacgattgatgctccgatcggacgtgttgccggatcaacaatcgaacggcagattgactttgaaaacggagaacgcgccatcacgcattacagacgtcttgcttatcatgacggattgtccctgttatcgctgcatttagagaccggacgtacccatcagatccgtgttcacttaaaatcaattgggcatccgctgatcggggattttctttacaatccgacggacacaacaataaagcggcaggcacttcactcctaccgcttaacgttttcgcatcccatcacaggagaatcttttgttctcactgctcctcttccagatgatatgcactgcctttttccagattttttctgagatttatgaggtattctttttcatagggaacttttccctttaatacctcatatttgaggaaatgattcacttcatcttccccttttaccgccagcatcaccagtaataattccagcatggcttttgtgtcttcatttaaaatataatattttctgcccttcagataatactggagcggactgtccagtttgaatttatcacgttgataattctttgatgcagaaacgcggtccacatacatctccgctacatacttaatcggcatcttcatgccacagatcccgcgatgtgttttttgtccatctcttccatcaccgactccataatcaatccagtactccatatgatgtttatttcgtcctttatggtgaagccatgccgcagaataccctttatcttcacgttctgcgttattcggactcattgtcccctgataatatttgcatcccaccagaaattctgtcggtgtatacttcgacatgtcatgcagcagtccctgcttataaagtccgatcttaaaacagcctgcccggaccagatttttgtgatgcaggatcgtgcataaatgtttccatgcctttatcatgttcttttaccctctttactacttttatattccaattacaatattgatcgactgaccctcgattgctaaaagatgctgatcctcgaggatttctttttccggcaggaacgaattttccgctgccgtagtcatcaaaagataccatttcttgttctgcggaagtttcggcagcgcaagatgcgacagaccgctatgaaaattatagccgatatagatataatcatccggtgtctgatctgtcttcttttcatattcgccgcaatacagaatccccgccgcctgtctgtcagccggtatcgaagagatccatgcgctctccccatgataggaaagatctgggaaacctttcctgccgtaatcatttaattccatcggatgttctgatgcgatgatcggatgctccctgcggaaatctgccagattttttataaattcagccagccatgtttccttcttttgtttcttccagttcagccagccggtcttattgtcctgacagtaggcattgttattaccctgctgtgagtttaagaactcatcgccccctaaaaccaatggaacaccctgtgccagaaactccattgccaacgcatttctaacctgttttttccgcagattatcaatgtatctttttctggtatttccctccacgccacagttactgctgtaattgaaactgtttccatcacagttatcttccccgttctccagattgtgtttttcacagtaggaaaacagatcccacaatgtaaatccattattattagtaatgtaattgacaaacccttccacgctgttttgctttctctgctggcagaaaaactcgttaaggtttccttccatatggttcagcatttttctcgccgggtataggtattcatcactatatacatataaatgatgatatttttttgcattttccaaaaggatcggatcaaaatgtgtataaaacagctttgtccggctgagcagaaggtcctgtgccgccgccgtaacaggcagtgaatccccctgaagatgaaatccatccacatgatactcacgaacccagaaccgaagtgcatctaaaatcacattctggttcatccccggcgcaaaataaaattccatcacacattccatgccgttctcatgcagtgtatgtaccagttcccgaaactcagacgctgcatctgcactgctgctgtaggatgccttcggtgcaaaataattgccgggaacatacccccagtaattaatcttttccaccggctgtacactttccggtttgatcagatcttctccgtgactttcccacttaaggtaatccggcagtaccgttttctttgggatcacctgttcctcaaactcgtaggcaggcatcagctctatggtcgtaatgccaagttttttcagatatgggattttatctgtaatcgctcggaatgtcccccgttcttttctcggacaggatgtatcctccatggaaaatccccgcacatgcagtttatacataaccatctgctgccgtttaatctccggctgtctgtcgttttcccagtcaaatgcctgcggatatgcaccgccacagataaaataatccttctcactgcgggttttgtcattccatttttccctgccgataatacgggttgcataggtatccgtaatgatttttccgtttatctcataattatatcttaaatttttccataacttaccggttacggccacagaacgcacggatccccggcaatattcctccggtactaaaattttgcagacaggttctgcttttttcccataaaaaagaatgctgcagttctcttctttttccccttcgaacgtaaaaatcactgcatcatcctttttctgtactcctaacttttcgtaattgccttctctgatcgtgtaatccatgctgtctgccaccttttctatcgtaccccagtatctttttctaataaaaatagtataccttttttttcacattttgtatagaaaaatatgttcaatcacatccgattatgttatgatgtcattgtctttattaggaccactataaaaaagagaggtatcggcatgagcgatttcaaccagaacaatgacgatgaagatatcgttgtaacccttgatcttgacgacggaagtcaggtagaatgcgaaattcttaccatttttactgttggcgaacgtgattacattgcacttctcccactcgatgaaaatggcgaggaaaacgaggaaggcgaagtatttatttatcgttattctgaagacagcgaaggcaatccttcccttgataacattgaggacgatgaagaatacgaagctgtatccgaccgttttgacgaacttttagacgaggcagccttcgaggagatggatgattaatccttcttcttttccggtggctgcgcttctttgataaaacgggaaatttctgcatctttatggttcagttgtctgactgaaaaaagatgcagatttttttttgctctcgtcattcctacataaaacatccttcgctcttcttccacttccggttccagcactgcttttttgtatggcatgacaccctcattgacgtcaatgatatagacattttcatattccagaccttttgcactatgtaatgttgctaacgcaacactgttcgggttctgattctgcacgcggtaaaattcctgcagctcttttgtgtaattttcaatgtggtcaaaccacgcatcataagtcttatattccctcgctgcatccaggagctcatccaaaacatcaaacagatcgtccgctttgatacgtctgtaatccgcatattctgtacaaaactcatcatatccgattgccttccggatgtaattgatcgccgcatacggacttaatctctctaacatacggatatcgccctctaatttttcgatgcgctttgccacccacggctgttcctcatagtaccactcccacacatcaaatgctacggtctcctcgtctagcgattcccggctgatatagcgtttcggacggttcatgatctgcaggaaatccctgcgttccctgcttcccatcgcaatccttatgtatgcaaaaatatcttttgcgatccagtgctcgtataagttcggcacggtatctctcgttcggaatggaatattatactccatcagctgttccatcagaagtctcggctgtgtattggtgcggaaaagcactgcaaattcttcatattttgcgcctttctccaccgcctcctgaatatcccagatgattcttgcattttctttgcgctggctttcaaacaactgccattcaaccgggatatccccctgatccgccgcctctatttttttctgaaagcgttccttattgtggccgatgagatatccggcacttgtcacaatgttttttacggaacggtaattcacatctaaaagaaccgtctccgcctccgggtaatcatctttaaaatgtaacatgatctccggcttcgcgccccggaaacggtagatcgactggtcatcatcccccacgataaacagatttttccgctcacccgctaacatttttataatgtcatactggatccggttgatgtcctgaaactcatcgatcaaaatatagcggtatttattctgccatgcggcaaggatatcggcacgctgttcaaaaagttccttcgtgtatactaacatgtcatcaaaatcaatcagtctgtttttgtacaaaaattcatgatattggcgataaacctttcggaacacggtctccgcacagtttttcgaataatagttggcgatttctatcccggaatttttgaccagactgatctcccctaacagagatgtgataaactccgtctcatcctcataggtcagatgttctttcgctatgatctcacgcatacactggtagcgctgttcctccctggcaatattgtctgcgctgtaattatatgcatgttttaaaatagcaaaatatactgcatgaaacgtgccaaatgtcaccggacatgaccggttcattttccgctgaaatcttcgcttcatctccgttgcagcggctttggtaaatgtgataacaaggatctgtgccggatctatcccacacgcttcgatcagatattttgtacgttctgtgattacaagggtttttccggaacccggtccggcaagaacgagcatcggtccgtttttgtgatggattgcccgtgtctgtgatgcgttaaagctcatagattacctcaattcataaatttgaaacggcagggaaattgaaaatctccctgcctgataaaaaactcttactgctctaataattcaataccttttttgatgcgggcaatggactcttcttttccaagtacctccatcagctctgtcgctccgcccggtgtcatctgtttgccggaaacagccgtacggatcggccacataacataaccgttcttcacgccggtctcttccacatattttaacaatgtggcatataatgcatcattgctgtaatcttcctgtgcctctaacagaggaagtacatcttttaatacttttaaggaagtttccgcatttgtcttcatcttcttgtgtgtgtacattgccacatcatattccggaagtgcctcaaagaaatcaatatgctctttgatatccgggaatacttcgattctggtttttaccattgctgcaatcttctttaaatcaagatcctttgtgatcacctcgcggatatatggctctgctttttcatagaaactgtcaaaatccatagctttgatgtattcgccattcatccattttaactttgtgtaatcaaaaactgccggtgatttgctgattctgtggtaatcaaattctttgatcagctcatctaaggtaaaaatttctctgttatcttccggactccagccaagcagtgagatatagtttacaactgcttcacttaaaaatccctgctctaatagatcttcaaaagaagaatgtccgcttctcttagaaagtttcttgtggttttcatccgtgatcagcggcagatggatgtaaaccggtgattcccagccaaatgcatcatacagacgctggtatttcggcgaagaggaaagatactcatttccacgtaccacatgtgtgatgttcatggtatgatcgtcaaccacgtttgcaaaattataggtcggatatccatcggatttgatcaggatcatatcatcaagttctgcattatccaccgtgatatctccgtataactcatcatggaaggtcgttgttccctcgttcgggatgttctgacggatgacaaacggtttgccagcagcaagatttgcctccacttcttctttacttaaatgcagacagtgtttgtcatacatcatgatctctttaccgtccacttctgtttttaaggactctaaacgctccttgtcgcagaagcagtagtatgcttcgcctttttctactaattctttggcatatttcatgtagatgccggtcttcatacgctcactctgcacataaggaccataaccgccatccttatccggtccctcatcatgaaccagacctgtctcctctaatgtgtgatatatgatatcaactgcaccttccacaaaacgctcctgatccgtatcttcgatacgaagcataaaatctccgcccgcatgtttggcaattaaaaactcatataatgcagaacgcagatttcccacatgcattcttcctgtaggacttggtgcaaatcttgttcttactttgctcattgtttgttttcctcctgtattctcattttccgttttataaatccggaaaagattttcaaacgccgtacacgtcattatataacaattttttctgcctgacaagcttacaaattgaaaacagagacaggatttttctcctgtccctgcgctgcccagctattattttattattagatactttgccgacattatattttggtaaatattgcagtttctttcttcaaatcggttgcaatctcaaaattctcatccatacggttcgagatattttccatatccgtaaccagcacctgcgtgctgtctgctgcattgctgactccctttgcgccctcctcgatggcatgtgcgatcgtattgatggacctttgtatttcaaccattgtattcttcaacgaatctgtctttgattcaaactcgttcatgacattctctatgtaggtcgccttatttttatattcacttccggccgttacgaattcttcaaactctggaagaatcgactcgttcatatattgtaccagtccatttgcattgtctgctaaattatgcactgcctgagtcacaacactgttgatctgctggatacggtttgcagcttcctgactggcagctgcaagctgactgatctctgttgcaacaacagcaaaaccgcgtcctgcatcccctgctctggctgcttcaatagatgcatttaatgcaagcaggtttgtctggcttgcaatattcaaaatatcatccgtcaggctatttacctgatttacactgttactgtcctcaatcgccctgtttaatacctcaagaatctcattgactttcgtgccggtagattccatattagaacgcgcagcagattccatggaatccgcatgacctttcatttctttcgtataattattaatctcagttgtacgctccgcaatctgatttacctctcccgcaacagattctgtattggaattgatcaaagaggcattatctgacatctcctgcatggtagctgaaagttcctccgttaatgcagacagatcagacacactgctgtttgatgtcataacactttcacggacttcattgactaccgtttccatacgttttgaattatgaatgatcgttttaaaaatatcctgtaattttcccatgaaaaggttgatgccactgccgactgctgccacttcctgattctccataatggttactcgtctggtcaggtctccttctcttctgtctataccatcaataatctcattgatctcattcttcgttttagaaagtggtacgattaccatcttcagtacagaaaataccgcaaacagcaaagatgccatgctgacagcaatcgtaacgaagctgaccgtcaaagaatacttatataccttggtcaattgctgctttgccgtatctgcattattatttaccacttcctggattgctgtaatattctgatctatcttgtctgcatactctgaaattgcaccgtttgccaaagcatacgcagcctctttatttccatttgcgctgtatgccataagatttgcattttcatatttcaaaccttcataatttgacaatatcgcctcgtaattttcgcggtctgaatcatctataaactgttcaaaatctgacagatactcatcaagcaccgtctgttctgaacgtatgacatctacaagagagatcattgagtcaagatctgttgctacaatatgtgacaatccaagccgatgaatcttttctgtttctatctgaattgatcccaaatctgcgatacagaccatataaccattcgcaatctgtgttgcattctcattaaccttacgaatattttttactgccagaacactcgaaataatagatataattccaataacaaacaccggaatcaatatgatcattttcgtgctgaaacgtccctgttttttcataatgtgatctgtctcctatcctttattttgctgcggatgctgttattccttcaacaagtgtatccataatttcctgcagatcctgaccggatgggttaccagctgccatcgtatcactaaatgcagaacatgcatcccagtaactgtttccaacgcgctgcagtttaccaaattctgattgtgcaataacagcctgaattgccggcacctgtttcaccgcatccgaagccgctgcattcgtattcgaaggtccctgatttctctcttcaaaacggatcgtctggttctcttcatttgtaagccagtctgcaagttttgctgcccattccggatatttggaatatgcattcacgcccatcattttataaccggtaaaagaagacatctgtacctgctgccctgccaccgtgtaagttggaagttttacggctccgtaattatcgccccatgcttccctgactgaaactgcattccatacgccactgattcccgcactaaccgtaccattctgtactcctgtaatgaaatctccatccggctggctgataaatgccggattggttgtgatatttaaaatggcctgtgccacatcaacgcctttaattgctccatctgtggcgttccagttacagtaatttgtcacgccatcatcattaataccaaactccagacccgtattaccaaaaaatgtatacagataccagcccgaattaagctccatggaaaatgatctgcctgcagcattcagtgcctctaacatgccatccatcgtctggacatcttcatcggaaagaacatttttatcataatagaggaagtatccgttatctgccgtcattggataagcatataagatatcattaatagatgcagcagaaaccgactcttctaaattcgcactctttacttcttctgcatttggcaccggatataatgcaccagcggcaaccattgcagaaagctgatcatccgcaaacgggaaaacatccgccccgttatgaatatctcccaaaagaatatcctttgtatcagaatcagcattttgttccaatgtaatctcaaactttgcctgtcctgcatatttctgttcaaagctgtctatcatctggtttaacatgtcgaagttgtcttcttccgaccatactttaagctgtaccacaccattatccgcctcagcatctctttctgtcatctccgtagatacttctgctcccggcattaccgattccacagcaccactattctttacattttctttatcagctgtgaagccgcagcctcctaacatcatacatacaactgtcgtaaacagcatacctgcaacaattcttttattcattcttattccccttctctgtcttctgctgttttaataccaatattttttattttatactcattttgatatttttcaacattttttacactctttttcgatttgataatacgcattttttacctttttatatgatgtctgctaaatgaaccaaaatcatcatttttacatatcttattgtaaacctgatattgaaaggaataacttattatgagaccttatcctatgtccgggaacagcaatcgttcctgcgaccgtttatctgtttcacatcctgcacaccgtgcaggtctggacttttgcacagaatctgcatcctgtgcagattctgtttcctgttcagaaaatataagaaccatttctgattatgtactcgccatggcatacgtcccctggcagcatttttctactgtttatgaaccggatcgttcactcagtgccgggactatttttccagaactggataaaccatttttagccgcaaacggaggtagatgccgatgatgatcagtcagatgaatcagtcccaactcctccactggatcgatatggtcagctttgctgtcgtagaaatcacagaatatctcgacacgcatcctgacgatgaagaagctttaaaatatttcaatcactatgctgacttaagacgcactgcactgcgtgcatatgcgcaaaattatactccgcttaccatcgacaccgcaaatcctgataattactggcgttgggcatcggatccatggccatgggaaggaggtgactgttaatgtggaattatgaaaaacgtttacagttcccagtcaacattacaagacccaatgccaaaatcgcacagatcatcatcagtcagtatggaggaccagatggagaggcggccgcatcgttccgttatctgtcacagaggtatagtatgccatataataaagtagcgggactgttgacggatattgggacggaggaattagcccatctcgaaatgattgccgccatcgtccgccagcttaccaaaggcttaagtgctgaagaacttgaggccgccggtttcgctccttactatgtcgatcacacggccgggatctggccgcaggcagccggtggtattccgtttaatgcctgtgaattccagagcaaaggcgatgcgatcacggatctttttgaagatatggctgcggagcagaaagcccgcaccacctacgataatattttacgtcttgtcaaagatccggaagtctgtgaaccgatccgttttctgcgccagcgcgaaatcgtgcatttccagcgtttcggtgaaggcctccgcctggttcaggaagaacttgacagcaaaaacttttatatgtgcaacccggaatttgatctgggatgtggcaaatagactgcatgttctgcaagccggcttgttgtcacaaacaacattttgcattctattagcatgaaataaaatactgcgtacaatatgcccctccggcatttgtacgcagtatccatatatttctcatcataccacaacttattcaaatcaaacattacacaggcagacctgacgcaccggacagaaacttacatcgtttccatcaaccggtcaattgcattgatgatctcatcgatttgtggtttcatgcttccagcctttgaagaaagttttaatgcttcctccctctgatttttcatttcttcgacattatattccatccgatcccttaatttctgtctgcgcaggatcaggccgtgcttcacctcaaccatttccctgggatcaatcagggctgctgcctgcgtgatccagacctgtgcatcatataactgatactggttcaatgcccgcaccagtctgccattaaagtattcaagatcctcatttgtgcgttgatatttttcacgttcacgcactgcatccatataatactgccacagctgatttaattctgaagctcttcttacatgatacttctcacaggcataatcaatggcattcgtgatattgacatatttaaactttaccttattaagtaaaagaattgccttatttgcacttcgttccgctaacttgatctcagagtcattgtgcagcatctttagataatcggcacacaccgccactgcagtgacaaaaataagtaccatccatgcataatatgtatcaaccttaaatccaagctgtaacgtgataagtgtcactgccactgctgccacaattgcaagaatgatgtataataaattctttaaacttttctgctggtgcatcagatattcacggtgtaaaagccatctggatttttcccgttcaagatatttcatatccttttttatagtatcctgatagatttcattcgagctaaggcgtttgattgcatccggcatggttttttcttcctgctgaagctgcgtaaactgtgcatctgtcagttttttttctgaattaaggaaaatatttctcgcactgtttaactgaacgacattctgtgccacatccgcaatttttttcttttcaggttccggaagatcttctaatttctggacatcattcagataagacgtgactgttcggtactccgatttttcctcctcgatttcccttgtgatatcgatcatctgctctaatcgttccacaacatactgctccacctgtttcggatcttttatgttattttccgtcagcacagtctggctcagatcatccattttttcttcaaaactgcgttttttccatctgtcaaaaaatttcatttataccatacaatccttcctgtactgttttttccattcctcaagctgtgtctcccacacattttcatcccccggatcccactcatcaagcattgtctcaaactgacatatcgcatcacttctactgcagctgctcaattcatctgcaatcttttttgcttcctccggtgctattttaaaatattctctcctgcgttcaaatgcccgctcatcatgattacagcggcatgccatcagacactctttcaaggactctttatcactgcttttttcatatgcccttgcatagcagtcagctgcctgttcaaacaaaaacagcctcgcatatgcggtaccaagattgtgccacactgcgccaaccatctgtggcatttcagtttcacacgattgcagaagttttctgtattctgcaatactgctgatgtatttccggttctccagaaaacggtcagctttgattttcccacattcaaatgccgacttatgttccatttcctgaagtgtattccggatctgcttttgttcctctttcgtacaataaccacacgctgacatcagacagccggtaaattcagacaaaacacctccgccagccttgatattccttagattctgtgcaatatccggcaaatgctgttcattttccacccagtcacacaactcgtcatccataaagtctgcatccaatagacaggtattatttttaatataatagcacagttcatccagcgaataaacatttaacgatacattttcaatataatagggcatcgccgctaactgctggctgcataagatcaattcgcccattcgtttctcctgcctctcctttgtctactgtacattttccagtgacatcatatattcccatgttttgtcagaactcttaaatatctccccaaagccaaggtctttgatcctgatctttacttccatgtcggaaaccggctgtgctttgatgcgaagacgcgttgtgcgtggcggacgttcgggaagatctgcaagcgtgagtttctcaatcttcgcttccttgctgtttggcagctgcagccagaaatcgatctcgtttgatccatccagcaatacttcgcattctccaacagtctcgtaccagttatctcctgcactgatcagcgtaaaaaactctgtttttccctggctctgcactttcaggcttacattcactttcatctcattatcgcccatatagacaaactgccagctgttttcttccgtcatacactttcctgccgctgcataacaggcacccttggaataaagatttttccccataaaaaccctgcggcctttgcacaaaaaagaaagggactccttcatccattcaccatcaaaaccgtctccggtcaggtaaactgccgaaacaatatgccctcctgtcacttctgatacgatttttaaaaagctggcatctttatttgcccggtctatattccgctgttcctcgctgatcgtgacaagctgcggcatggttctttgatcccgttccaatctcctgcaccagacctcatctccccggttgtcaaacagacacacatcatgcagccataattctttttgctggctgaatgcgaaataataaaaactctctctcctgtcaatgagtgtcagctttccctccggtattccaattctttctgctacctgaagaaagagctccgtcacctcccgcgacagctgttcaagtgtgataaccaaaaagtcaggtatcacaggattccccagttttcccgcaagatataccagcttttttatgtagagtgctaacagttcctgtgccttataagtttccccctctatgaaaaactctttttccgcaagagctgcctgcagcagaccggatactgcttcctctccctgcaaaagtgccagacgttttgcctcctcaccgataaaccactgaccgatcccatgttttttggcaagtatcagaggaatctggtatacttcactgcctgccactgtgctgacagtctccggttccttcatattcaattggaaataactgatcacggcattgtcattatcaagatcaatgccaagataatacgacgttttttccacttttctccctcttacttataaaatacggaatacctcattcgttaccatctgcattccatagtattgtttcatttctctcttttgcatctcacgttctcccatcgcgtgatgcatcagcatgtcattcaacatttcataccttccatgagattcttcgtccggtacatttcggcaatttaagcaggcactttccgttatcttctcctccgccttttcctgctctgtcatataataaagtacagactcgccaaaaaataagacaaattccttgacaaaaacaccatcatagacctcatttaacagtgactgctcgtaatgttctccatccaggctaaaatgaatcataattttttgtcccggatctgtatgatattccacaaacgctttgtcatacaaatgatactttaaacgtaattctttctcaaactccagaaaaaatgcaaagcagcggttcttagacgtgtactcttccaacaattcatctgccacctgatacatcgcatctgataaatgctctttctctgagaaatatttcagcagccccagtttacacgcatcgttgagaggattttcttcctgataacgggcaaagatctgttcaaatacatactccggtaccaccatattcctcaccagccatgcatctgcaaaatacgataaatatgccatacagatcagttcccgtcccccgccttttacataactctcgtagatctcttcaatatccgcaatataatcagtcgaatacagcatctggcttaaaatacgttcctcaagatcaaacgtgtcaatatcaaatgctcccgcagctttccagatctccgccatcgtctttgttgcaccattataatatttacaaagatagataaggatcacatcattataagtgcctctgtaaaatacatgctctgcaaacccaagaaggaaatcatcttcctcaaaccctgctgtatgaatcgcataactgcacagagaaacgcatgcagccgtatccatgtgctcatacccacactcttctgccatgcgatacgcagtttcatacaaatgttcttccgtcaggtactgcatcagcatacggcgcgcagctgcagataacaatttatgatccagaccggtcagacagcccgcctcatactttcttttccggtaaaatgatatgatctgttcggcaatttcccttttatagcggtcactcacctgcggtgcttttaaaacagtccacacacccggaaaatctgaatcatccactccatccgcaactttttgctgcatggaatatagaatataggataattctccctgtgcaagttctgtacactttttcacacaatggtcaatatccatcagcggctcttcacaacaaccgatttcctcacagaaacgattaccataaatgtcctccatgatcaggcagtaatcctttgtatatacagtaaagtatgcagccccgttccggatcatggattccctgttattcacatgattgcatgctgggctgcatgcatattcataaacttctatctttgctgcctgtggatccgtacagatcatcttgtgcgtaaaaagaatttcagctgcccaatgcgcaatatcactatttataatcccctgttcaaacatttcatcatatatcacggccagattatcatcgatatgaccagcctccatctgctccatcgcaaaccgttccatgatcggcagatatttctgatatacctcaggctgcaccttttttgccgcaataatattgacaaataaaaccgccttctgctgccaggacaatccactgtcatactgaaaatacagctgaagcatctttggtacacgttctaattttcttccatccagtgataaaagatacgcttcatacaggctcgtgatgcggatctcacgttcaattccaagttcataccagtgatgatactttgcaccaaagcactggctgcggatcagatatcctaacaccgccgtcagcatttcatcatccggtttcacctcataacacgcctctaaaatatggtataaaaacggatgatattcttttttttctgaaataagcccggccacctgtattgctatatcccgtgtcataatgccccatcttgcagtccagtataatatgcgaacctcaaatgatccaagtctcgccagtaaatatggatcctgccagatcagataatatgcctccagataaaaatacgggctgttatcataacgcatccagtcacgaattgcttctaacctttctgccggcttctgataatactcttcttttaaaaataacagcacccagaacaacatcgaattatccggatgcagtttaaaaatctgttctacttccatcgtcagacgatccacataggacggctcccgctccatcaatgtgcacagataaagataatacccccattccggactttcatgatcctcacacgtccgtttaaaatcatctaatatccaggatgcctcctgtctctggcggttgatgatcagcgtctgtgccttcatcagtccataaatcttttcattctcacacaaaacggaaagatgatccaaaataaccccggactggtttgcccatactccggtcacaatccgtttcaggcggtattccagataaagctgcattaattttatgcgtgatttctggatatcaaaaaaaacaggttcatccttcgttttattttcctgcttagtcgtggcacacaccgtatagatcaatggtttctgtcccggtatctccagacggatctttccaaaattccttcccgcatgcattttttctgccacaatataatattccacatcacagatacttcccacaaacatctcatcggtgacccgtggtttctttaaaaccagaaattctgcatccgaatggactctgatttcaagatatccatgctggtttctgttcacctgaaaagtttcaagtctgttttcatgcacctggtaaaatatggcactgctttcttccaatgaaaccacagtccgcttctttttgtggattccgatcaaaaactcctccactttctgtccggatggtgttcctttcgacaaaccctcatataaaagcatctcccttttttcatccggatgaaatatgtttttaaacttgcccgaataaaacagatgaaatgcctcgtcaaagtcgttttctgataatctggcaaaatcggataaatttttcactttgccaaccgaggattctgcatacagttttgaaacagacacaacaaaagaaaggttatattcaccctgttctactacgatacagaactctcctttttgaatatcaccttcgatcagaccataactatgaaattggtaacgaatccttatttcttccccttcaaactgcggtgtcagacattccatcctcggattggaagaatatacgattccacgcatcggcacatgatttgtgcttgtgatcacgaaatcccccgaaatatcattaccttccattgctgtgatgtcaatcttatccacagaaattgaaagagacggctttaagtgttcgaattttccccttgccagttgttgtatccgtcttcgcaaatcgacacctgctttttctctcttaattgcttgctttttcaatgacaatcattataatagattataaaccaatttggaggagttcgcaatgataaaacacaaagaccattttcacggaagtgatttagaaaaaatagaacagatttacggcatcaaaaaagaagagatcgtcagtttttccgcaaatgtcaatccgcttggcgtatcaccgcttcttcggaccgctctctccgagcagatcgatgtgatcacgacataccctgacagggaatatacctccctgcgcaaatgcattgcagaatactgcggcaccgaatacgaaaacgtcatcgtaggaaatggttccacggaactgatctctctttttatacagatcgagcacccgaaaaaagcgatggtcatcggacctacttattccgaatatgagagagagatttcactcggcggaggcacaacactctactatccgctccgtgaaaaggacaacttccgcttagatgtcgacgattttatctcccatttaaatgaaagtattgacctgatcgtcatctgcaacccgaacaaccctacttcatcctgcatcaccagaacggaaatgcgccatatcttagatgcctgcaaggaacatgacatttacgttatggtggatgaaacttatgtggaatttgctgataatatggctgaaatctcagccgtgccgctgacaaactattataacaacatcgttatcctgcgcggcacctcaaagttttttgcagcaccgggtcttcgtctcggctatgcgatcacaggcaaccgtgacctgatcaaatcaatcaataccaggaaaaatccgtggacgatcaactcccttgctgtcgttgccggagagacgatgttccgtgacactgcatatatcaaagccaccaaagatctgatttcttccgagcgagcaaggatctaccggacattccagaaaagtcctgattttaaagtgtatgaaccgagcggcaatttcatgctggtacgcattttaaaagatgatctcacttcacaggatctctttgaccgcgcaattcgcgagaaaatgatgatccgcgactgctccacctttccatttttagacaacaagtacatccggctttgcatcatgaatccggaggacaacgacagactgcttgcatgtctgctccgttaagtattcattaagtattagcagggaagttttgggacaaccccaaagcttccttttattcatgataatagaatgttcgcggagcgtgcattttattattttggggcataaaaaacggcagaccatatgatctgccgttttttcatggccatagattcctgccgaatccataccattgattcttttatttttccctgtaattacatcattcccatgcccgggttgcctgctggaactgccggaacatcttctttgatgtttgcaacaacagactctgttgtaagcagtgtagatgcaacagatgttgcgttctgtaatgctgttcttgtaactttaaccgggtcaaggataccattctcaaccatatctacatattcttcggttgctgcgttgaatccgataccgtctttggactcttttactttgttgatgataacagcaccctcaagacctgcgtttgcagaaatgtagtataacggagcttcgagagcttttaagataacctttgcaccggtcttctcatcaccctctaaggtgtcagctaactctgcaacagctttggttgcatggatatatgcagaaccgccgcctgcgatgataccttcttctactgctgctcttgttgcatttaaagcatcttccatacgaagttttgcttctttcatctctgtctcagttgctgcaccgacacggatgactgcgacaccgcctgctaatttagcaagtctctcctgtaatttctctttatcgaactcagatgttgtctcctcgatctgtccacggatctggtttactctgcttgcgattgcatctttgtcaccggcaccgtcaacgattactgtgttctctttctgaactttgacagattttgcacggcctaactgatccatcgttgtgtcttttaattccagaccaagatcagagctgattacctgaccacctgttaagattgcgatatcttcaagcattgcttttcttctgtcgccataaccaggtgctttgacagctactacgttgaatgtaccacgcaatttgttgacaatcaatgtggtaagtgcctcaccctcgatgtcctcagcgatgatgagtaatcttgcgccgctctgtacgatctgctctaacagaggaagaatctcctgaatgttgctgatcttcttatctgtaattaagatgtaaggatcatctaatactgcttccattttgtccatatctgtgcacatgtaagcagatacataaccacgatcaaactgcataccttctactaagtcaagctctgtctgcattgtcttagattcctcgattgtgataacaccatcgttggaaactttttccatcgcgtcggctaccatgttacctacgttctcatctcctgcagagattgcagctacttttgcgatctggtcttttccgtttactttggaagacattgcaaggattgcttctacagctttatctgttgctttcttcataccacggcgaaggatgatcgggtttgcacctgcttcaaggttcttcataccttcctgtaccattgcctgtgctaaaacagttgctgttgtggtaccatcacctgcaacatcgtttgtctttgttgcaacttcttttacaagctgtgcacccatgttctcgaatgcatcttctaactcgatctcttttgcgatcgtaacaccatcgtttgtgatcagtggagcaccgtaggatttgtcaagtactacgtttcttcctttcggtcctaatgttactcttacggtatttgccagtttatctacacctgcacctaatgctgctcttgcttctgtgccatatttaatttcctttgccatatctgtctacctctttctgaatttattaatgataaaaatatgttttactctacaactgcgagaatatcattctgttttacaatgatgtattcttctccgtctaattttacttctgttcctgcgtatttcgaataaattaccttctgacctgcttttacctgcatggtaacttcttttccatcaaccattccgccaggaccaactgctataacctctgcctcctgtggtttttcctgtgcactgcttgtaaggatgatacctgattttgtagtctcctctgcctcacactgttttaatacgactctgtcgcttaatggaactaatttcatgttgcttacctcctgcttatgatcatctgttttatttcttttgagtagttattagcactcatttcttttgagtgctaacttatggttcatataatagatttttatatttgaatctgcaaccaaatatatttctatttataattatttatcccaatattttcttattttttctctctttttctcgtttttttataagttcactcattttctgtgattttatactttttttattttttcagcggagactgttttaccgtgcgttttacggtctgttttactgtctccttcattgctttatttccttccgtccaaagcagttttatggctcttgaaaacagtttctgccgctccggtgaaagtttactggtttctttcatcagttcctgtattttcttccatttactgtggtaaaaatcatctaccgtacggatcccgactttttcgatcatatcaaatgccgtctccacgatctgtgctctctcttccccgtctaactggtaaatccatgattttatcgtttcatccagcaacaggctctgcgccgcaacctgatccacatgtacaaaagatcttccgagtacctcccatgacatggcatcgtgctgctggatcccgctgtttgagctcttgacaacttcaaacgactcctgatgttctaagagcattccgacaatggaagattccggcaggatcgtgtgcagcttcggcagcatgcgctggtactctgtgctttccaccatatcgctccggaatcccggaccatcattgctgtacacatttaaaatctggttctggatctgcggatcacattttacggaggcatacacggcaaaatttccaccctttgaatggccgccgacacgcaccctctgctttttgtctgtcactgcacggttcaaatattccactgcccggagctgtcccggtgtttctgacagataacccatattaaaatcttcccgccagcccgtgatcgtgttgtctgttccgcgaaatgccacatacaggctgtcatccggcagttccacacagaccgccgaaaactgaaactgttcctcatcccggatctcattgacatagcagcgtagttttacatccgaaaaacgttttgtttccgccattttctccataacaaacggagccgatttcgtcatggatacccgcgccaagatttcgtctttatcattcttttcccaaaattgtccggatgcctccttaagcggtactgccggcgcattttcctctgcagtaacgatcccctcaaaatcaacatatgcaagctgcgctaaaatcagattatcaacttcattaaattcatctgcctcaaacgataaatcaccacgccagtccatatagtccatgatatttgccattgttttccccctgtcttttatttaaatcagcccataatgtttcagtccgttccagatcccatctttatggatatctgtggtaacaaattctgccgcattctttgccacatccgtaccatttcccatggcaatcccatgtgccacaaattcaagcatttccacatcattagcgctatccccgaatgcataggtatcttcctttgcgattccaagagacgcacagaggcgctcaatgccgcttgcctttgaatgccccgcctgcccgatctctaatattccatccggctcatggacgatcatatcaaactccgttcccagttcttttctgacaagttctacatctgcatttccaagttccgcactcagcttatttacctcatattgtgcagttccggtaatactttttaagttttccccaagctcatttctcagataaatgacatatggatcatccttaaaatccttttcatccacataaatataatttggaccttccagaaccatcggtatctgatgcttccgcagcactgtgagaatatgttcaatctgtgccttcgtcagcagcagttcaaataacttttctccctcaaattcgatatgtgtaccgcatgccgccacgattccgtcaaatccaagtgcaagtaatttgggacttttaatatttgaccggcttcttccactgcatagaaatgcataataaccattttttctgagctcttttaatgctttttttgtactttccggaatattcattttaaaatcccacaaagtaccgtctatatcaaaaaatactgcttttttcattgtcgattatctttttcctttctactgtgttgttttttattctaacagaattcattccttaagcaaagtcttttcctgtctgaaacacgaaacctgaaatggacggctgctgttcagacacaaaaatgccgcgcaaccctattacaggtcacgcggcataaatatgcacatgattccactcgcgatgcaatgccccgctcatattattcgcgatgcaatgctccgctcgttttactcgcggtgcatggagaagctttccatgtcatagttctttaagttgtcatggatcgtacggtcgtctgcctgtccgatcaatgtatcacggttcttcttggaagatacctgatcattaaacgcacttggaccgccgacacaaccgccctcacatgccataccttcgatgaagtcttccggcagtcttgctgcttttaacagaagtaatgctttcttacattctgctgctccgtttgctttgcatacagtcgctgcaatttcatcgttggattcttttaaactttcaagcacggctgctgttacaccgcctgagtttgcgaaacgtttaccaaatgtagatgctgtctggtcatcatttgcacatggctgtaattcaacaccttttgctttcatcatcgcacggatctcgctgtaggtcaatacatagtcagcatttccctcgatcttctgatctgccacttcagacttcttggcaacacaaggtccgataaatacagtgattgcttccggatcttttgctttgatcagacgtgaaactgcacacatcggagacactgttgtggacacgcactctgctaattccggataatgtaaacgcaccatatttacgaatgccggacagcaggaagtaactttcttatttccctctttatatgcctcagcccactcttctgcctcataagctgctgtcatatctccgccaagacctacatcatagaaatctgtaaatcccatctctttcatggctttcttccagcttgccatggtgatatcaacaccaaactgaccttctgttgccggagctgccattgcatatatatgcttacctgcttttaaagcctcgataaccggtacaataaatgttttggatgcgattgctccaaacggacagctgtggatacatttaccgcagcggatacatttttctttgtcgatcacggaaatgccatactcattgtatgtaatcgcattaaccggacagctgaatttacatggtctctttaaatgtgcgattgcattgtaaggacatgcctgtgcacatcttccacactctttacatttggaaggatcaatatgggagcggtctcttcccggctcaattgcgccaaatttacatgcattgacacatgcttttccaagacaattctgacagttttctgttactgtataactggaaatcgggcaatcctcacatgcggaactgataacctggatcacatttccatcatcctctgcacccggtgccttgccctctgctaaacggactctctgacggatgatctccctctctttataaatacaacagcgaaactgcggtgtcggacctggaatgagttctgttgcgatgtggtctctctcttcttcaagtctgccttcaaatgcaagctttgcgactgtgtagagtacatcgtgtttgattttaatcacattttcatctgcatacatcgtgttttacctcgctcatcttatctttgttaactttttaaccatcttagacattatatattatctgtatggaaattcaagtacttcgcatgtttttattgagaaacacagtaagtttttcacctcttattgagaaaaagcgcctttcatgctataattaagctgttcgtctgcctgacgatcatacattttacaaaggactaagaaggtactacctgtacaaaaccggagatttttatgaatacattttccaaactttacgatacagaattgtacaatcaggagatcaaatcaaataaacggactttaatggggttttgctggtttttcctgacactgctgcttgtctgggttttaaccatgatcaatttctttctgatcagtaaatttttaatcagtctttcactaggatttacggtactcttactcattcctgctgtcattatctataaaaaggccgatctctcaagtccatggatcaaatatttatttctggcattgatcagtatcatctgctcgatcattaccgcactgcttacctatcatgcagttttgattttcgttatgccactgttatttgcgatccagtaccggaaacgtcaggcgctctggttttcctttatttttaacacgattaccatgtttatcagttcctatgtgggattttattacggactgtgtgacctgaatctgctcttagagagcacccatacaagaaactggtatctgcagactatgtccggttcttttctgcagattccttttaatgaaaatcctgtatttatcattgccgtctttgaagttttgccgcgtacactgatcctgcttatttttacgatcatgcttcagtatactatcatcagcagtcacaatgatgcccttaggattgcagagcttacctatcgcaaggatatggatgcccgcacaaaactttataataagaataaatacgaagatatggctgtaaattattatccatccgtcggatatattgccgttgcattctgggatctgaacaatttaaaaatgatcaatgataactttggacatgctgttggcgattccctgatccagaccatgtcagagaaattgcttgccgtttccaatgaaagatgccgtacttaccgtgtcggcggtgatgaatttctgctgatccttgatgatccggcacctggtgaaataaaccggatcatacaacaggtaaaaacggaactctcttccggcactggcactaccggtctccgtatccttgctacagtcggttcggcagaaggatgtggagccgatatccgttcacttgtaaaaaaagcagatgccgccatgtattcagacaaggcaaagagcaaggagggcagatcatgatctatattcttacagcatgtttagttttggtatttcttttgtttttcacttcctatctgctatatcgcggtgtcttttattatccgcaaaaaaagcatgtcgacccgtaccagataccggatgacatgctctatgccccttataaaaatgctatgctccatcttctccatgaaatggagcagactccctatgaagaagtttctatccggtcacaggatggtctgtctctgtgcggcagactttatctgtttcgtccggatgcaccgcttatgctcttttttcatggatatcatggaacttttctctgggatggtctgggatcttttcgcttctgcaggaaaaatcatatcaaccttcttgtagtcgatgagcgcagccacgggaaaagtgccgaccagatcattacctttggtatccgggaatgcaaggatgtaaaatgctgggcagattacgctgcaaaacgctttccggaaaaatccctgatcttatccggtgtatctatgggttctgcttctgtcatgatggcatctgttctctccctgccgtcttctgtgaaagccctgatctgcgactgcggatacactgcccctgccgaaattatcaaagaaaccatacggtcttttcatctgccggtttctttctgttatgccctgctgcactttggcgcacgcattttcgggcacttcaatctcagtgaatcaaccgcattatctgccgtaaaacagacaaaactgcccattctctttatccatggggatcatgattccatcgttccaccaaaaatgtgcgacgaactttatgatgcctgtgcatccagaaagaaaaaactgatcattacaggctcccagcacgctgtcaacgcaatggctgattttgattcctatgaacgggagatcatgaattttctcaaagaatccggaataaagatttaaaacccaaaaccggcaaactctccaaataattctaacagctcaaagccgtttagcttcataagattacattcctctcccgtcagttcagatatctggcagcctttttgcacagagatcctgccactcagactgtccgtatcatccgattcaaacgtaattgttccgtcctttgctgcaaggtttccgctaatatttgtctgaatcgttgtcgttttctcccccgtcaaaaatgcgattttcatattctgtgtccggaaatcacctcccaggaacagaacatctatattctgtgcattttcatcatcctcataattgacagaaacagatgccagcttattctgatacaaatatacactgcattccatctccccggccgcagatattttatcataaaataccataaaaacttttcccaccggatccgcagatatttttgtcccgtccccgtactttttcttcacagccttctccgctgcatctaatacattttgggcattatccttgctgattgtaaactgataccccgcacagtttcttttctgaccatcaattttaaattcttttttttctgttttctttattttcagtttgttaaattctttccgcgcctcttttaatatatctgttccgatcgttttctgctcatttccaccatatagttcttccaaaatggtatcgaaacgttccagcttttccgaaccgatctttttcgcaagatatccactttttccaccattcttataatcgtatgtaaatactttcgagctcagtgacggaagctgtgttttcagctctttttcatccagtgtcattacaaattccagatccggcagcttatctaaatctatcgttccctttaactgtttctgatcggaaacggatgcatattctgcctggattttctgctctttccattgtccgtccatcgaaacggtgtaatcctcatcctttgaaacatctgcggtttccggctgatccttgatcgtatgatatgctgcatataaaatcttatcaccttttcttaaaaagaaaccattctttatccctgcaaacagtacgattgccaggattacaataattcccgcagacagcacccatattttctttgagatttttttatgatcattttgcttttccattgtaagcctccatttagatcctgaaatatcaaattcatttttcccgttttctttttatccggtttattttattctttttttcatgccttgtaaacctgttttcaactatttttatttccatttgtgctgctttctaatacaatgttttcatccgtacaataagcctctatacaataaaaacgccccggtattacatccaagtaacaccggagcgctctcctgcctgtctgttctgttttctaatccaacagattctgcatactctttaaactgatcaaaagtgttgatgtattatgcagtaacgccgatgtggtcggctgtaaaattcctgcaacaccacataatattaatcccaaattgaaacttacgataaagcggtaattgccgcggatccgtttcatcaggctgtccgataacagctttaatgttacgatctgataaagatcatccgaaccaactgtaatatcagcgatctctcttgcgatctcagcaccatcactgatcgcaataccgacattcgctgcagaaagtgccggtgaatcattgattccgtcaccgatcatgataacttttcttccggccgccttttctttctcaataaatccggctttatcctccggcaatacttccgagtaatactcatccacgccaacacgctttgcgattgctgctgcggtacgctcactgtcgcccgtcatcataacaactttcgtgatcccggcacgctttaatgaattgacgactgcctctgcttcctcacgaagaggatcttcgatacagattacgcctgctaactttccttcgattgcaagatacaggtgtgaatattctttcgggagagaatcaaacaattcctgttttccttccgggatcgtacagttttcatcttcaaacacaaagtggctgcttccgatgactgcacgttttccatcgatcgtcgtggaaataccatgtgctacgatatattccactttggtatgcatttcctcgtgtgcaagatttttctgctgtgcagcatccacgactgcttttgccatcgaatgcgggaaatgctcttctaaacatgctgcaatacgcagtaactcatccggttctgcaccgttaaatgatacaacatccacaacagtcggtttcgcttttgtgagtgttcccgtcttatcaaacacgatcgtgtctgcatctgcaacagcctctaagtattttccacccttgacggtcacatggtaaagactcgcctcacggattgcggaaagtaccgagatcggcattgcaagttttaatgcacaggaaaaatcgaccatcagtacggatatcgctttatttacatttctggtcagcagataagtcaatgctgtaccgcctaatgaatacggtactaatttgtctgctaaatgctctgcttttccttccagtgccgattttaatttctcggactcctcaatcatagtaacgatcttctcaaagcggcttgaaccgccgacttctttgacaagaacggtaagctctccctcttctaccacggtgccggcataaacagaattttccacaattcttctgacaggaacagattctccggttaaggatgcctggttgaccattgcctcaccgtcgctgactatgccgtcaaacgggatgacattgcccatatgtacaacgacctcatctcccggacggatctcagaagctggtacaagcacttcctgattctcgcgttttaaccacacttttcctacatttaaagacatcgtgcgcgccagatcatctacagattttttgtgtgtccactcctctaagagttcgccgatgccaagtaagaacatgacagaaccggctgtctcgatatcatttctgaaaatggataccccaatcgcagttgcatccagtaccggcacttcaatcttccgccgccataagcactgtaaacctttccagagatatttcacggatttgacggtcgtgacacatgcccggaatgggtacggtaaaaacatcctgcccgcataacgacagacgatctttccgatcagtttttcctgatattttgcatttaactcacggccggaattttcaatcactcctgccggaacatccactttttcataggaaaactgctgtaatgtgcggattatctctgcacggtctccgacataggagatcacagcgtccccggtgcgctcatatactttcgcaaatgtcacatatttattgctatgtaaaaaataaaggagcgtatctgcctgctcatagctcatccggtactgagacacatggatacgcatacgccctttgatctcatgtttgatgacaaacttcatttttctcactccaatcaatagtaaaggaaagcaccagggtatttttcccggtgcttcctgtcgcggtcttgatatcgccacattctttatcatggcgatatcaagaccgcgaagcgtgtaatctattgttttatgcttcttctgctgcttcgttctctgctgtgctgtcctctgcttccgctgcctcatctgcgaatgctgccgcctctgctgctgcagcgcgctcctcgttaatgttcttagcttcctcgtaaatgtcaccagcattttcctgaacagttgtaactgtgttcatcacgcactcttttgcgcggagaactgctgctgtacagtttgtgtaaactttctttgcatccttgcttgagagaactttgatacctgcggttccaaataatactcctgctgcaaaaacacctgttttcttccagttaatcgctttcaaacaatctaacatcttatgtacctcctgtggatttaattatttgtattagctgtcatttttggtcagaatctgactattttctacaaaatcaactgccctctctatgacattttcacgattatatacctgatttttccaattttcaataaaaaaacgggcaaatgataaaatttatcatttgcctgttttttcatatatttatgaacttttttctatttcgtattgagcgtgcgcatggagtttaagatcgcgattacagaaactccgacatccgcgaatactgcttcccacatatttgccataccaagggcacctaataataataccagagctttgactgcaagtgcaaatacaatattctgttttacgatgccaagtgtctttcttgcgattttgaccagtgatgcaattttcctgatatcatcatccatcagtacaatgtccgctgcctcgatcgcagcatccgaacccatgcttcccatggcgattccgatatctgctcttgtgagtaccggtgcatcgttgataccatcaccgacgaatgccagtctctctttttcattctgtgcacccaacagtttctccacctgaccgactttgtctgccgggagcagttctgcatgcacttcatcaatgccgagttctgcggcaacggcatctgcagccgcctgtctgtctccggtcagcataactgtctttttcacaccgacctgtttcatatcgcggatcgcatctttgctgccctctttgacagtatcggaaatcacgatacttccggcaaacacgttgttgcatgccacatagacaaccgttccggcagtcttgttttccgtgtaagcgatattctgcgcgtccatcagttttgcattgccaaggtatacttccctgccatcaataaatgtatggattccgtgtcctgcgatctcctccgtatctgtgacgcgctccatggaaagtgtttttccatatgcttcgcggatagagttcgcgatcggatggttggaataaccctcgccgtacgctgcgatctccaacaattcttcttttccgattgtgttgtttttgtccgcggaaggctgtacttccgaaaccttaaattcacccttggtcagtgtaccggtcttgtcaaacacgatcgttgtcatctcggcaactgcctctaaatagttgcttcctttgaccagaataccgatcttagaggaagcaccgattccaccgaagaaaccaagcggaacagaaatgacaagtgcacacgggcaggaaataaccaaaaagatacatgctctctggatccagtctgcccagccaccgcctaagatcaacggaggtaaaatagctaagatcactgcaccgatggtgacaaccggtgtataatattttgcaaatcttgtgataaagttttctactttggctttcttactgcttgcattttctaccagttctaagatacgggctaccgtagaatcctcaaatgcttttgttacttttactttgatcgtactgctaccgttgacacatccgctgatgatctcatctccgactgttgccctgcgcggtacagattcaccggtcagcgctgcggtgtcgatcatggaggttccctccgtcacgattccatcaagcggaatgcgctcgcccggttttacaacgatgatcgttccaacttccacatcatccggatcaacctgcgtcagcacaccatcttcctcaatgttggcgtattccggacagatattcatcatatcggaaatggactgtctggatttgccgaccgcataattctggaacagctctccaacctgataaaacagcataacggcaactgcctcggaatattctttcacgccaaacgcgccaaaagttgcgaccatcatcaggaagttttcatcaaacacctgtccgtgactgatgtttctgactgccttatagacaatgtcataaccgatcaccagatacgggatcagatagatcaggaatacaagccactggctcggtaactgctctaacactccagtatgctctaaaaccattaacactacaaacagcacaaatgcagtgataatacggtacagcatttttttctgttttgatgtcatattgattcctcttttcttcatttatttcatatgttcatgtattcatatgttttcttttttgtaagcccggtatgcatctgttttcaaccctgtactgcctgatctcttttttcctgcagcatttttatttcgtgcagatatatgatcacgtgcagcactcctttggcataaccgggctttccctgtatgagactgactgtcacatacaactatgtttttgttttacctgattttttttacattaaaatcttgcagtccggctcaacctttgcacagacttttacgacttctttcatgatgtcatcgaatttgtcatccactgcatctaccatcattttctgtgtcataaagctgacatttgcatcgttgacaccctcgatttttttgatagcctcttccatttttgctgcgcagtttgcacagtcaagatcctcaagtttgaatttctttttcataattgaatcctccattttctttttgatataaattttgtttttacttactcttcgatatgttctcttccctgatcgatgatcgttcttacatgctcatctgccagtgaataaatcacggactttccttcgcgccgtccggtcacaagcttcgcctgttttaaaatcttaagctgatgtgaaatcgccgactggttcatattcagtgactgtgccagatcgcatacacacatctccgactgaaacagtacgaacagaatccggattcttgtggaatctccaaacactttgaacagttcggcgagatcatataattcatcttcgtcaggcatctgttcatttgccgctctgatcttatcttcatgaacttcatatgcctcacagcacggtacatcgtctattgccaaatcttacacctccagtctttcacattatcatttgaacatattcttatctgttcatatgtttatgatagtactggtatgtggatttgtcaagagattagaatataattttcattctttgcgttttatattgttactgtccactcgtacttcgttccagtaacggattttgccgatgcttcgcattccaaatcggcaaaatctgctaccaccactgtatcatacggcatttttagttcagaaaatgcctgcctgtaaacagtaactttatattctccgtatcaaagcccacgcccccatcatcagatctgccggaacaatctttgctgctgcccggtgcagggtacatacgatacccggtgtggatactgccagcccaagttttgcatccagcagtgcatgacgcgccacatttttctgtcgggaagcaagcggaaagctgtgaatataagaactgtcactgctcttctttgccctcccgatgaactcggtgtccttgatccagtaaggacagacagcggtcacacggattcccgtaccgtaaagttccacgcgcagcgccctgctgtaacgatataaaaatgctttcgttgccgcataaacactcagatatggaaacggctgaaatgccgcggtcgaacagatctgcaaaacacgcgcaccgcgtttcataaaaggcagtgtgatctgtgtcatggcaacggctgctttacaatttaagtcgatcatgccatccacatccactcttttgatatcccgccaggatccgatctttccgtaccccgccgcattgatcaagatgcgtacatccggtttttctttccagagcatcgcctctatttcatgcagtgtctccgcctttgtcagatccccggtaatgatcctaagatgtgtctgaagttctttttccaatgccgtcaggcggtcttttctacgcgcgaccacccatatttcatctagtttttcctgtttcctgatctgtctgacaaactcactgccaagcccgcttgacgcccctgttacgattgctattttcataggcactattcctttcctgatatcctgatcattaagtatttttataatttataattataacaaattttttcctttcttacagtcattgtgcactgatacggcgggcaaaaaataaaaatgagaccacctgtacagtagtctcatttttatataataaagtaatttttctgattaaccagaatttcttaaccagaatctgttaaccctttacactgccaagtgcaacaccctgtacaatgtgtttggataagatcagatatacaatgataaccgggaagatggaaaatgcgatcatcacatatacctgccccatgtcaaacttgagccagtcagctccacgtaactgtgcgatcaggataggaagtgtctttttcctgtcatcatgtaaaaccagcgccggtgtgaaataattattccagctgcttacaaaagtaaagatcatctgcactgcgatagcaggtttcatcaacggcattacgatagtattaaatgtatgaaattctcctgatccatcaatgcgcgctgcttcgatcagtgacaacggcaatgtactttccatgtactgtttcatgtagaaaaacgtaaccggagcggcaattgccggtacgatcagaggaatgaaggaatcctctaatttcatgctggaaacaagtttgataaatccaagtgccgttacctgtgtcgggatcatcataatcatcaggataaacggataaatatattttttcagtttgaaatcatatgcatggatcgcataagctgtcatcgtcgaaaaatatacactgagtactgcactaagggaggaaacgatcagactgttgatcataccgttccacaccggaagtgttccattccttaagtttttccagttttcccaaagatggctgctcggaatcaatgtaaaacctgactgcaactcaccgtttgatctggtcgcattgataaacagcacataaaaccagaataaacacaaaacagagacaatcgctaatacaacatatgcaataaatcttcttgcatgaattcctacacctttttttaaattacggttctcattcatacttttcaccccttcctcttatcattgccggttatcttaaatactaccagacttaaaatacctgtaatgataaacagaacaactgacagtgcaccagccataccatagttcttgctgtagagatgtttatttaagaacatgatcagcgtcatggtagaacgcatcgggtcaccggttccgttggttaagatctgtggcacatcaaataactgtaaaccaccgatcagagatgtgataaccacatatacaaggattgggcgtaacagcggcagtgtgatctgccagaatacctgcgaagaagttgccccatcgacctctgctgcctcaaacagagaggtatcgatacccatcatgcctgccatcagaaggatcgtcgtattaccaaaccacatcagacagttcatcaatgcgatcaaccctcttgcacttcctacattcgataaaaatttatacggtgtatcaaccaatccaatctgcatcagcattgagttgatgggtcctccatcagaaaacaacgtaaagaacaacatggaaaatgcagatgccatgatcagattcggcagatatacaactgttttaaagaaacgggttccttttaatttaagacgtacatcggagaaccaggcgccaagtaccagtgataaaatgatctgcggcacgaaacacatgatccataataccatagtattttttgtataaacccagatatctccatcagaaaagagtttttgatagtttgcaagtccgacaaactttggtccgacctgtgtcagtcctgacatatagttttcaaagaaactgttgtaaatagtgctgactaatgggatcagctgaaaaataacgtatactacaataaatggaatcaaaaagatatatccccatttattgtaccttactacctttccactactttttttcatgataatctgacctcctttttcagagtgtattattttcatccacagagctcacagcatccttcacctttatcctgtgtaaacatgctgtcagctctgcgcttggcattttaacctgaataaaccgcacctgccttccttattgcattccggcaggcgcagcttttcattcataacaacagaatatccgcagagcgtgctttccattgttatttttagatcattcatcttcttaatatgttaattccggatatttctctaaaactgatttgtaaaacaagtctaatgcctcttctttcgttgcacttccttcaaaatagttcttcattgcatgctgaaattcttcgttgcatccctgatcgtatgaagaaagattacttaaatcaagtttggatacaccctcattataaataccaagtggattctgtccgcctaagattttacttgcgtaagagctgtctgccatctcaacgattacatcctgattgtttacaaagtcatcatctttctcgatgatctctctcataacatcatcattggttgtcatctgaagcaagatatcttttacaagactctggttatccgttcctgttgctgcacagatccatgtaccaccccagaaaaagccctgtggtccttcggttgcaccccagccgccgttgtaaccgatactgccttcggtatctgctgccattgagaagtttactaaccatgcaggtccaaagtagcagaatacatttccttccggatagaagcctttcttccagtcatcactccacatatcatatgttcctgtctcgcctgcatctacaagctctttggaatcatccacccatttcataatgttgtcatcaatattgattttgccatcaacaacccatttggaagaaacgttgttggaatatacacggtatgtatcatttacggaagatgtgatggtgtagccggcatctttcatcttctttgctgtatcattaaatgtatcccagtcttttacataattctgaacctctgccggatcatcagaacctaatactgcttttgctgcatctctgttatagaataatacgccaggacaaccctgccatgaaagaccttttaatacaccatcagaattggtaacaacatctttggtgtactgatactgtttagaaagatcttcatcggtaataccaaggtctgtcactgccattgtgtagtcggtatcaacatatttcaatgcataatcagcttctaccaggaagatatcaattttatcatcatctgctgcatcagactgctttaataaggctgcatccaggttattctgatatgccatatcatcactcggggtaatgttccattttactgttacatcaccgatcgtacctgtggttgcatctacctctgtatatccaggataatgatctgtcagacgactcttgaactcctcattccagcagtagatattcaatacttttccctcatcagaagtacctgtctctgcgtctgtacctgctgtctctgcgtctgtatctgctgtctctgttaccggcgcagtgtcttcttttgctgtgtcattggatgtctctgctgtgctgctgtttgctgtatttcctccacagcctgccaataaagctgtccccattgctgccacaagcatcatacttacgattcttcgtttcatttacttttcctccctttttataagcatctttggaacactttatcttttgtgttcctgtcttgtttacaagtgatatattaccggatttcagctctgcattatattaaatcacttgaaaaaatatcagattcatgacataataatgcgaaaataaaaaacaggagtaatgctatggaactttcaaaagaatggtatcacacagaattagccaacagtgaatacgatatgctgcaccgttccccgactgttgaatattctttttacaatgctgtcaaaaccggtgacatggattctgtgatacgaaactgtaaggaagatgccttcatcgacttaaagggtaccggtgtcctttcccgtaatccgcttacaaatattaaatatcattttgttgtcactaccgctatgatcacgcgctattgtattgatggcggattagagccggagcaggcttaccgcctgagtgatttttatattttaaggatggattcgtgtaccaccgtccggcaggtggcagatctgcatcatgaaatggtaaaagattttaccggaaaaatgattttacagaaaaaaagttctatactctcgaaaccggtcatgcaatgtgtggattacatctatacacacatcaaagaacgcattaccataaccactttagctgaatataccggtctgtctgaaagttatctctcgcgcgttttcaaacagaacctcggcatatccatcagcgattatatccgtgaaaaaaagattgaaaaggcaactcatctgctgcggtattctgacaaaccgatcgtcgacatcgcaaactatctttctttctcctcacagagtcatttcattcagatttttgaaaactataccggactgacgcccaaaaaataccgggataaatattataaatccatgtggtaatgcatgttttctaaaagaagcagcatacaaaatctgtatgctgcttctctcaccctatcagtcatttttacatgttactcttgaaaaaacacatcaattctgtgacatttttttgggtcaagtgtttcaatcacactcttccttaaccgtacaccatattccggctccggttccaatacgactttctcatcgcacactgcccgtctgatctgctctattcttaagtccttcttttccggattatgcattatgatctcaaatttcttcctggcaaattccagcttcaatccagcactgcctttttcatcaaactgttccggcagcagagatggtgcgatcaccagatctccaagatctccttttacaccaaatacctctgtgatcatcgtcagcatataccagctcgccgcacctgtcagatatgcataaagtcctctgccttcattatcaaaatactccggcagtcccgggtacattttactgttttcaaaattcattgcggcttctaaaagtgtctgcagaactttatgtccctcccggataaatcctctctgatacagtgcattcgcatacatgactgtcatatgggaaaacactgcaccattttctttttccccataggcaaatccaaacattcttccgagatcaaatttctcctctttaaaatctgtattcagacgatatccaccggctttctgatcaaacagaaatttgtctgcactcctgcagatttcttttacctgttcctctcccgcagttttgctcatgactgcgaacacctgtcctgtcagcatcatgcggacttcatcctttttactgtactcaaccgcatttccatgattgtcataatatccgttaaaccaacccatatcatccccggcactgatccattctttctctctgatatgctgcatcagccactctgccttctccaccagattctttcgtatctgttctgtggaaaccaggatcatgcctccttttacattatgttcgcagaggctggtatattcgtccagcagtttctgctttctgtccggactttcatataattctgttccttccgcaagcagacatttcatctcttctgccatttcaattttactgatcccggttttctcttccatatgcttcagacaatctgcaatgtcttttaaatttccagcatatgcacacgtaaatgccacactctcgcctttttcccatgccatgtcaagtgcatcattccagtccgcaccgtgcagtctcatctcattatgctctccgacatcataaaaagcacatagattctgcagtaaaatatgttctaaaattgttccaaaataaacatttccacctgctgtgcgctgtttatttccatatgcatgatcccagttattatcatgtgcagtacctctttttgtctgcagatctttgaaataggttaccttctccagcaaaacatcaagatctcctgtctgatccagatataattttgtcgtcacaaacggccagaatgcatgatccatccatacgcgtgtaatgttattgcggtctgcaataaattctccctgtctgctgccaatgatcgttgcgttcgttccatccatccttacaccgccataattgtcaacaatcatctggcgtactactgacggctccatgatcagcagagcaagacagtcctgccagagatctctccagccacgtcctcctttgccataatcatgatatggtaaaaatgaacagccataaatgcggcgcagaaccggctgaaaacagatccattttaaataattatcaatgtttgtatcacccgttgaaaaatcaacatttactttgtccgtccagtgtttttttacggcttcaaatgccttctcgatctgttttttcgtacggtaagcagatgtcattttctcaatattctgtttttccccggaaacccctgcaagtaccagatacgtgactgtctcctgtggttttaaggtaaccggtgcgaaacgcattccacctgctgcctcttttccctgcagttttgttcctgccagaacaccgtccttatccattcttaccgcttcgggattcaggtaacttcccccttccccgataaacatttccgttgtcggatagaatttttccggcgcctctccctctcctgtagatccatatacaaaatagaccgtctgatttttctgatggcccctctcatcaaaggaaagcaccgggcacacctccacgccatacgtttttgtttcaattctgtgcagcagcgacgtcacatgacgatgatccctgatattgtctgcactccgtccataaagcggaatcacagcaaccggtgtaatcttctgttcctgatccgctgtattggtcagttctgtcatcattacttccattgtcccatctatcgtaacaaaggaagtggtttctgctttcatttcatattctctggatattctcgtcagtttctgccacataaaaccagcttctaatatgctttcatcctgatcctttgtaaattttgccgcttcctgctttgccgaagaaccacagacggaccagctgcccttattttcaatacgacaccaaaaatttctcgtattgcggttattatgtaaattttcaatactgacaggttctaacagaaaatgattctgatctgtcttgctgtctcctccgagatttggcgtgatactggattttaaccctgtttcacctgccagcggaagatacagcccgctgtaattttccggattatggatacggaaggttccatttttatctgtaaattctatcttgttcataagactctcccttctttacatgccattttttttacgacataatcagttctatgtctgtctcatcagtaagcacagtctgcggaatataattatctttcatctcctgtccattcacgaaaagttttttgcagccgctctcggcatgtcccggattttttacggtaatatgcagatgacatcccctgaaatctttatctatctcaaacatctcccattctttcggaatcgacggtgcaatgcgaagtccataaaggtcaggacgcatgccaaggattccctccacacaacccaccataaccgttgatgctgtcccagtcagccagtgtacatgggatcgtccaaaattcggactgtctttcccttccgtaaactgcccataacagtatggctctaatctgcggatctctgccttgtcattctgcgctgccggagcgttctccataaaataagtaaatgccctctccccatgtcctcttaatgcttccgctaaaatgatccagccctgcgactgcgaaaaaataccggcattttcttttgttccggcattgtaaataactgcaagagccccgtcaaatgcatgttcatggtatggaggatccattaagattgctccatattccgtgtttaacctgtcataaacctgctgtaatgcacagtctgcctgtttctcatctgcaagtccgctgatcaccgcccagctctgagggtttaaccacatatttgcttccggatccgtacgttttccaatcgtctctccactctccgtaaatccacggataaatctgtcttcatcccagcagagttcctggatcagatttcctagctttttctggttttcatccagaaatgcaatgtattccgtatcctttttatgttctgcaaaaatgcgtaaaattgtcattgcataataaaactgaaatgcaacaaacgttgactctccatcttttccaagtcttaaacagtcattccagtctgcatagagtccggctggcatgctgtgctttcctagatggttcatggaaaaatcaatcgcacgtttcaaatgttcataaaccgttccttcatctttatttgcaaatggaattacctcatccataaatgcagtatcgcccgtttctgatacatatttgtatactgtcgggaacagccagagtgcatcatctgcccggtaagccggatgtcctgtttcctgtacataagaagcatcgtccggtgtatcttcatgtcctggattgtgtgtaaatttaaccagcggaagtcctcctccgttatccacctgtgcggagagcataaaacggattttatctactgccatttccggtgccagatgaatcacaccctgaatatcctgtaccgtatcgcggtaaccatatccatttcttaaaccgcaataagtaaaagatgccgctcttgaccagataaatgtcataaagcagttatatgcattccaggtattgatcatagtgtcaaattccttgctcggtgtctttacctggaaatgggaaagttttccatgccagtatgccgtcagttcttccagttcttttttacatacttcctctgtgttctcatatcctgctacaatttcagccgcctcatcatcttctttcattccaaccaaaaatgcgatttccttagtttctcccggtttcagatgaagtacggtggaaatggctccgcagccgttttcattataatttcccctgttatttaaaacgccgtcttctacccctttgggatttccatatccatgatatctgccaaggaattcttctttttctccacaccaggaatcggcttttgccccagcaagtccgaaaaaccggttgatcacggtcttatggtcaatttcttttccattttcaatcttatcaagatttgcatggatcatctggcggatgcggttttcacagaaaactgtccttgtgataaactgtgaatattggagatttacctgatcctgctcataattactgttattcgtaaattccgcataaccggtcacggtcagctccctttcccggtcagaatcgtttgtaatgccaagattccacacttcatatgactgatctaacggaacatagtaccgcacttctgaactgataccgtcatacacagctttcatctttgtatatgcagtgccatgatggcactcgctcttataagtatctaaactttttccaaccggctgccatgatgcagaccagtaatctctgttttcattatccctgatataaatatatctgcccggttcatcaaactggttaaagacataccttaaaattcttccgtttgctcctgattttgcaaaactatatccccctgcattattggatataattgctccatactccggcgaaccaagatagttgacccatggtgccggtgtatccggtcttgtgatcacatattcttttttactttcatcaaaatatccgtatttcatactgcccctccataattatactatttcattcctgctttctattgctatgataccttaactataaaggttatctgaaaatagttatacaaaatacgtccttaaaataacagattcatgacctgtcctttgcagatatactatggtcaaaaaaattttcaatatatcagaaaattaccggatatttttgtgtactttttaatttataagacgcaatttcttataaaaaacgcaggaatcctctctgcagattcccgcgttttccatttttctatgcaatggctgttttcttctgttatttcaaaaatccaaacagcccttttttctcatatggctcttttctgactgcacctgactcataacctgtcccgtcaatgacagcctttaattcctgctcatcaatatcctgttccgtgatgatcacggtctgttttttactgtgagaggaagatacttttttaaccggaaatgcgccgcgaaccgcttcattcacatgattttcgcacatcccacactgcattccatctacatccactgtaatctttaacatatttactccctgatctgtcagcccgcctcctcacagtcgcaggactgtactacgacacttttaattctttgtttatcgatataaccacatgctttcaaacctgcaagcactaccgcattccagctttttgccgataattcctttatggtatcatcatcaagttcgatcgtacatgccttttctctgtcacataccgccccacatgcgatacgatacatattttttctactgatagccccgatttcttctaataaattgaccatgcgataaacagttgccgccccgattcccggatcaacttctgctgctctgtaatagatttccttgcagcaagaacaatcttcattgagaatcacgtccagcagcatcagacgctgcttggtaatacgacaaccctgttctctcaatctttgaatgacaatttctttctgcatctgggttctgtggtaatttgccgtttcatgatttttctttttctgactgtttactcctgccgtcatggtctcctcctatattaatgacagtgccctccgcacttcccacaatcgcctccacactgaagggattttccgtttttcttatcgcgaaccatgctgcggatgataagtcccacaattaccacaactactgctcccgttacaactgttcccataagataatcctccttgttataaatatggctgccgtgtcaacacacggcagccaccttagaagcagtgcttatcttgcgcctgccatgccttttacatttacttttaatgtatcgctctctttgtaaggtctgaataacagatataaaagaccgattacaagtacaaaagcaacaacagttccaataccgaatgtaccggttgtgatcaatgtaccgatctggtagatacataaggatactacatatgctaaaccacactgatatccgattgcaaaccagaaccattttgtattgttcatctctctcttgatagctcccattgcagcgaagcaaggtgcgcataagaggttgaataccagatagccgtatgcagctaccggagtcataacagcggcaaggttgccccagaattcagtaccatcttctgcaacttctgcgaaaccaaataacataccgaatgttgctacgacgttctcttttgcgatcagaccgctgattgctgcaactgccatcttccagccgttaccactctgtgtccatccaagcggagtaaagatccagccgattgcagaaccgatctttgcaaggatacattctgccttggcagcctcaagagcagcaccctcaagtccatcgaaacttaacataccaaagcctgcatctgtccatccgaagttcatcaagaaccataagatgatggttgataacgtgatgatcgtaccagcttttttgatgaaagaccagccacgctcccacatacttcttaatacgttgccaactgtcggccagtgatatgccggaagctccataacgaatggtgccggatcgccagcgaacatttttgttttctttaaaataatgccggagcatacgattgctgccacacctacgaagtatgcgctccatgcaacccatcctgcattgtcgaagaaagcacctgcgatcaaagcgataattgggagttttgctccgcaaggaataaaggttgttgtcatgatcgtcattttacggtcacggtcgctctcaattgttcttgatgccataacaccaggaacaccacatccactaccgatcagcatcggaatgaatgattttcctgaaagtccgaatttgcggaatacacgatccatgatgaatgcgacacgtgccatgtaaccacaggactctaagaatgcaaggaacaggaacagtactaacatctgcggtacgaaaccaagtactgcacctacaccggagatcacaccatctacgatcagacctgtcagccagtcagcacatccgatgttttcaaataaactctgtgcaccagggatgatccattcaccaaacagcgtatcatttgtccagtctgttaagatagaaccaatcgttgttacagatacataatataccaaaaacattacaactgcaaagatcggaattgcaagccagcggtttgtcacgatacggtcgatcttatcggaagttgtaagtttctctttgctgctctttgaaacacattcgccaatgatggatgaaatgtatacataacgctcgtttgtaataatactctcagtatcatcatcaaacttatcttccatttccctgatctcatatgatacatccggaacagatttcatctgctctttgatcttgtcatctttctctaataacttgatcgcaaagaaacgtttctgatcctctgaaacaataccgctcagtttgttctcaacctctgtgatcacatcttctgcatctttagagaactcatgtaccggaaccatgttcttcttctgctgtgcaagtgcaactgccttttcagcagctttctggataccggttccctttaatgcagaaatctcaacgacttcacacccaagctttctacttaatttgtcaatatgtatcttgtcaccgttcttctcaacaagatccatcatgttgattgccataataaccggaatgccaagttccatcaactgtgtggacaggtaaaggttacgctcgatgtttgtaccatctacgatatttaagatggcgtccggtctgtcgccgatcagataattacgggcaacaacctcctcaagtgtatatggagataaggaataaatacccggtaagtccatgatgacaacatccttatgtccctttaatttaccttcttttttttctactgttactccaggccagttacctacgaattggttagagccagtcaaagcattaaataacgttgtttttccgcagtttggattacctgcgagtgcaatttttactgccataacttttctccttttatttttagtttgctgtaacttgcttttgtttgctacggcttgctttcgtttgctatagcttgctttagtttgccttttctgtcttttgttagcgcattctaacacaaagacaaaaaaaattactctacctcgatcatctcagcatctgcttttcttaaggataattcgtatcctcttacagttacttcgattggatcaccaagcggtgctacttttcttacatagatatccacaccctttgtgatgcccatgtccatgattcttctcttaaccggaccctcgccagtcagttttttgacctttacggtactgccgcaggctacttctttcaacgtcttcatcgtttcgctccttttcatttttgtatcatgaaactgcgctgttgcaacagttttataccataattttattcgccatgtcttttccgatcgcaactcttgaatccttgatgttaacgatcatattaccgtcgatctctgatacgactgtaacttctccgcctggaacaaagccaagattctctaaaaatcttctagtttcttcttttccaccgacttttttaatcgtactcggttctcctgtgtttaacatagtaagcggcatcatttcttcctcttttctcctactgtattgataatgattttcatttcttacgttggttagtatattctaacgttcattagatgtcaataacattattgatattttttctcattaattttcatttcatggaaaaaaacggatattacagagacttttttcacagtttatcgtcaaattgcacaataaagtatgaaaatttcaagtcatttgactttcagtctgacatgaaattgcagttt

SEQ ID NO: 5175 - DNA, 27440 bp, Unknown
  gut microbiota DNA sequence
ctcctgtagaaattttctgtttcgtttttgctgccgttcacacgtactgtgtgagcagcaaatatttttttactcctgcagacctgcaaactgcgccatataaagtttataataagcgccctttttctccatcagctctgccggacttccttgttctaaaataccgcccttgtcgatcacaaaaatgcggtccgcattctgaatcgtggagagtctgtgtgcgatcacaaaactggttctgccggaaagcaatgcctcgattccctgctgcactaaaagttctgtatgtgtatcaatgctggatgttgcctcatctaaaatgaggattttcggcatggaaatcatcgttctcgcaaatgcgatgagctgtctttgtccgatggaaagtcctgcaccgtgctcttttaactccgtgtcataacccttttccattttcacaatgaaatcatgcgcattgactgcctttgcagccgcgatcatttcttcatctgtcgcatctaatttcccatataaaatgttgtcacggactgttccatgaaagataaaattatcctgcgtcataacacccatctgacgccttaagctctcaatggaaacctttgtcaagtcgtaaccatccactaaaattttgccgtcttcaatgtcataaaaacggctgatcagattaacgatcgttgtttttcctgctccggtcggtcctaccagtgcgatcgtctcacccggttgtacagaaaagctgacatcggagagtacctttgtctccgccggtgttcccttatcataagtaaaacttacatgtgaaaattcaacacttcccttaatatccggcagctctgtcacatcttttgcatccacgatgtctgcatcggtgtctaagatatcaaagatacgctctgccgcggtaagattcgtgaccaggttgttataaaagttgcttaaattcatgatcgggttccagaacatattgatataggttccaaatgccactaacaatccgaccgatactttttcaaatccgagaaaacggatgccgaccagataaagcatcatcgcaccgattccccaacagaaatcgatgaccgggccaaacatgtcggcataagtcaccgcatccacgaatgatttctggtgttcgtcggtcaacgcttcaaagatctcctgtgtttcatcctctgctgcgaaactctgcactacattcattccagcgatatcttcatggacgtaggcatttaagttggatgcctttttccggaaaatctgccagcgtttgtgggatgccgtctgtacaaaccagattcccgcgatcatcagcgggatcgtggacagagacgcaagcgcaagccgccagtcttttaccagcatgatcacaacgactccgactaccgtcacaaattccggcaccagtgttgtgaccacattgaccagcacatcttttaaggaattgacatccccgatgatacgcgcaaggatttttccagtcggtctgctgtcaaaaaatgaaaacgacagcgtctggatgtgctcatagagatcctggcggatctgaagcaaaattttgttggagatcaccgccattgcatacattctgagttttaccatcacaataaagatcaggtttaacacgagtgcaaaaattccaagcccaatcagcccatgcagatcggactgtgcaatatagtgatcgattgcttcctcgatcaagagcgggtttaccagtgagatcgccaccgtaattcccatacatactaacacggcaataatcgtgcctttatacgcaagcagataggaaaacagccgccgcatgatttttttcttgtcggtattttccataaattcgtcttcacgatacgaattgactgccattacatcgcctcccctcctaagaacgtgccatactgcgccatgtaagtttcataataaagtccgcgctttgcaagcagttcctgatgcgttccgcgctccgcaatctctccgtctttcagatagatgatctcatctgcatgacagaccgcagaaatacggtgcgcaatgatcattttcgttgtatcttttaattcatttaatgttttctggatctcatgttccgtctccatatcaagcgcggacgtggaatcgtctaaaatcagaatcggcgccttttttgcaatggcacgcgcaatactgatacgctgcttttgtccgccggaaagtccgacaccgcgctcaccgatgacggtcgcatactgttcatccattttttcaatgaaatcctttgcctgtgcacagtctgccgctctgcggatctcatcgaacggcattacctttcgctgccccatcttgatattttcctcgatcgtgtcggaaaacagaaatacatcctgcaatacaacagaaatactgctgcgaagctgttttaaagaaagtttccgcacatccgtgccatccacttttacagcgccgtccgacacatcataaaaacgctgcagcagattgacgattgaggattttcctgaaccggtcgcacccatgattccgatggtttttcctgccggaaccgtaaagttaatatcagaaaggatattttttccctcaatggaaaatgaaacatgttcgaaagaaatgtcccctttcacctgttctaacacgacaggctgttcctcatctttgatcatcgccgtctccccgtaaatcttcttgatcttcttataagaagcaacggcagaggacaaatcattcgtcagccagccgagcatctccatcggccaggtgcagtttctgctgtactctacaaatgcaacaagtgctccaagtgtcatatttccatgcatcacggaaataccacccaggatcgtcattgcaaccggcagtgcttttcccacaaactggaaatacggatagtatttcactaatactttagactgactgatattcaagtcataataacgtttattgtgtgacaggaacttctcaatttcaaatttctccctggcaaatgcctttacggtacgcacacctgcaagattttcctccgcaaccgtggtcagcactgcattttcctcactgatgtcctcataaattttatccagtttccgctccatgatgatcgcgatcgcaccgcaggaaatcatcgtcacaagcggtatcagcgccagtttccagttcagatgaaacatacagtagagcaccatgctcacatggatgacgacctcgatcgtcagcatgccgacatatcccatcgcattccagatcttgtcaacatcatccttgactctcgccatcagttctccggtgttcgtattgtcaaaataattcatcgacaatgtctgaatgtgccggaacagatccttacggatctgtgcgccgatcttagaacttaagacgtcaaacgaaaactctttgcagtatccaaagatacagcgtccgatcccaaccgcaacgattcccaccagaagcccagtgagcagttccattttcccgccgatgatgacctcatccacgatccgctgtgtgatctgtggataaaccatatccagtccggtcgctataatcatggaacatattgcgaacaaatacccataccagtaatgtccgatatatgtatgtaactttttcataaattcttgtgattcctccttactttcccctcttacactccccggtctctgacatatttttgtaccgtgacgcaccactctgacagccgcctgcacgcttcacaagcagtccccttagcacaaaaaaatcccgcggtgtcatatctcaccacgggaagtatgtcaaaaaacattctatttacttttgcatgaatttatgccagcgtaacagaattaaccgaggtaattgtatgatgattatgcagttcgttgattgtaacatttgttaatctaatcattacttttacctctctttcttcaaaattttagattactttgcaagtatacgcttgagggggtgggttgtcaaggggtaggaaaaaattatgcggaatttgaaaatcgcaacgatctaatctaagtattctatcagatcaggatatttttctttattttcccttatgtaatttcgcttgaatgcagcaaattttgattctcttcgcagcaatgacttcacttttcttaaagccagtttttgctgtgatggttctttcatttcttccaatgaatcataaagtttattcatttcgcggtttaattcctgaaacctgaaatcacttttatacaccctcatccctgtatttttcaggttaaatacttctgttattaattttgccgtcaatacagcctgtctatttttatcgtttattgcgtgtacatcaatctcattttcctgcagccgaaaaataaccatctcttctggatcatccttacagcaatcgataatcccctcgtcataaatacgctgatttttcacattattacagtgcccacatgaccagaaaagattattccagtcaaatttgcgttttggatattttccgtccaaatgtggcaataaatgttccacctgtgcatcctgcagttcatttaattcacatatataacatttattatggaaatcttccttcaactgttttacgacatccggcatcgaataacttccatttgctttctgtgattccaatgccaatgatgccggagcaggaaaactgcgttctacttttaccattaaatatcctccctgctccttaacacttcctttaatctttgatattctgtcgtaatattaagtgcaagatagtctggaatttcatttaaatacatctccaactctgatatttcatcataatcctcatctgtaagtttttctttatttaccagttctttataacgattgaattttttctgcaacagcattgacatttcatttgaattaaaatagccttctacaattccagcatatggtacatctgacaaaccattttcaacaagaagattcttttccagatcataaattactgcattatccacactattgataataaacggtgaatgtgtcgacaaaataaactggatattcgggaaaattgatgtcaacaggtcaaggatttttcgctgcagctccaaatgaagatgtgtttctatttcatcgatcaaaacaattcccgctaccgaaaaatcgaattttctatctgactggctttccatacgaatgatcagatcaaccacaatatctaaaactgccgcataaccactagaaagcgtattgaaatcaaacgaatctctgtcattcatatgaatggtaaactgaaacgtctcctcatcaaatactaactctaccgaatcatcatcaaagattctttttaacagatcgtcaaaatttttaaaccatgctgctatctgctctgctttctccttttttccacccgtaacagccaaagcctgtgtcattttcagatcaagaagatattttacaaaatcctggcgcggcgtttcttcaatagaataatcttttttcagggtaaccttttctacatgctgtggaatctgggctttaaagatgcgatcggctttgtagtaggcggttacgaatttgccttgggagaacaaagacgaagtattctcagctaattcattaaattgtattaccacacctgttttctgaagtgaaatttccttttcatacaccagaagtctttttgatgttcccttctcatcttttgagcgctgttctatcttgtataagttatttttgccaaatcctacatcagcaggatataagttttcacattctatagtttgttcattaaaataatccggtcttgtaattaaataaatataacgagccaacgcatccaacagactcgtctttccactcccattttttccagtaatgatcaaatgtttcatatgattctctgataaaggaatttcaatatttttcaaatgacgcacatgatctattttaatgtcggtaatataaatctgatccacttttccctcatttccgattttgcaaaatccattctttcctaaacggttatattaattaactttattatacacattgatgggcaattttccatttaatttttcggcaatcccattttacactcacaaacttcaaattccattttactaaatgtatcaatgaactgttgtttataacttttcactttgtcagcagatacaaaaaccgtcaactcctttttcactctggaacaccctacataaaataatttatacgccagcaaaattttctttattttattaatgtttgcatactcacttatatacttaaatgtcctttcacttttaacgattttccgataattagcctgataacaatattcataataccgatttccagcaaattgagcatctatttcttgtacacatttttttacacttccataaacatccttattatgtccttctctcaattctctttctgtggcattgcaaagtgaagtcaatgtacctgttctggataatataaacaagcaatccggtctcataagtctgtttgtcattaaattcgtattatgagaagtcataataatctgacatttaggatattttttcttgagaaaattcatcacattttcggacatttcataatgataaaatgcatcaaactcatccagatatataaaagatggagtccatgcttttggaatcaatctacgatacatatcaactaatgccagtgttccacttgaagcagtttcataaaaagatactaatttttcatgagaaaaatacaattctctttgtccatccggcagtttttttaataccagcttacatataatccccataccattcagaaaatcttctaaatcttttaatctgtctggttcttctaaagcttcatagaaactatccttcactctcataggagaatatgccataacattacttgctgaaatatctgtcattcgtctgacataacttcccaactttaataaaatagaatcattttccaacgctacattgctaatcaaccatctaagaaacggtaatacatgttccgggatttcattttccatgccttccgaacccatagactgtatatatcgatctatattagtgctctcagcatttatataattcaggttttcaaaattatattttttttgttcaaagtcacattcaaaaatgagctgatcatcaattatcaatttttcttcttttaaatcctgatccgaaaatttaacatactggtatactaatttctgttctccaaatttaaattcataagtaaatctcgcagaatcttctgttgaatcagcattttactgataattccatctgtaatgcaatcctgactaaattgataccctgaaatgccctgaaaatctattactatttcttctttaaagttcttataattttttaacattctttctgctgtttaaattctattgtcttactttttccacctgttcttcgtatcagctcatcctgtcctataatcttaacaagattcgctatctgctgtcccatcacatcccgattgagataaaatattgtggtatatacattctcattcaggataagttctcttaaaatatctttatctgttatatcaagggaatgtccaaaaatatatacgttatgcattttacatttctgatctcgaactgctgatgcctgtaaacgatgcatcatacgttgtacatcattccccacatattcatttgcccgattgattattctctccttttcctgtaaaaaatcatcatattcttcccgaattgtctccacccaatccttatatttacatccagtctctttataaattctctgataaaatttcttaaaagcaataaactccgtttcccggtcttttctttcatccgtaagatactcatcaatcccaagaaccatattattgttttccacggtattaaagagttttgccttgccatggatataatcaatgctattttgtatctgctgtttatccagataaagccgttcatatgtattggtataattaaaagacaacactttacaatattttatctgctcctccccgtctgcccctttaacattttcttttacaatttcctgtatatccggtaaaacacaattacattcctctttttccacataatccgtcagataaatttctaatgcccgaatcaatttattcagatcattgtataaccggtctctgatttctttataggtaatgctttcacctttaccatgtgtcaatgcacttgcagttctcatagctgccgtatatttagaatactttttgtgcaaaaaaggattggataaattctgcattttctccgacaattcacttttttccccatccttaaaaaacatatcctgatcaagagactgaattactttgcttatctcgttttcaaagtcaatccaattttccttctggtacatcggattctgaagaaaatattctatccatatattatcttttacgagctgttctaactctttgcaaagctgctgttcgttaaaaataagatgatcgatatatttatacacagtcttttcagtattctttaattctccctgctgcaatatctgcggtgtattgataatatttaagaaacgctcaacaaatccaagaaaatcattatatcttgtaggcagcttatgagccagatcaaatccatttccaatcacaagtatattcatcgaattattctccaaaatatgttaaaagttcaagctaaacttttttatctcttatctttttattttgatccaacaggattccaaacaggttaaataaatcctgattgtttccattatgaaaatacagattgttctgtcttgactccatcagaagtatcctgtagtcattgacgtagaaaacaccttttcttatcgtctctgcaaacaaaaatcatattttacccttcaattcttacatatcctcgacaatcgattcgtactccagatccgattctgtaagttcattttttcttccaatatattttacatatggaccatccattgacatatctaatattcccaatttatttttttcttccaacaatacataaaatgcgtaacacattttttctttatatggatcagcatctgataccatattaattgcattattcatataggttaattcttttttatccggatcaatattaaatttttgtatatagcgtatcttttcaagtatataggaattaatcgaaaatggtttcgccttttccttataaaattctttgctttctatgagatttttcattctggcttcaccctctgcaaatagttcttttgcctcgttataatccatcacatagtttgcatgccttaagtaatttcttgcaagcgcatgttgaattttatatgaattgggtctgatacttgctgacatttccaaataattataggaagcaacaaaatcgtttactttctgctcatataaccccagctgcagccagtaataacttatagcttcatattcttttttcacactgaaataaattcttttgatatcattttttttcagcttcaatctgttttccaaaatatcttctttcaaaagacattgaaatataatataccaaatatcatttctacgttccgaaacatatcttgacacatatcttaaaatatcaataatcctgtcacccaattcttttttgttacttatcaggatatatttctcgataatggcatttcgcaacgacaagccattctcatccatacgaacataatccactatttttgccatattcctagtaacatcttcatccaacgaaattcttttcccataacgttctgtaaataattcgcgtggataaatctcaatatctgctgtatcaaatattgctaattcgatcaataattgcttttctaaatccgaaaaacttttaaatgtgatatttaatttatttttgtttctcttaaaaacattgccatatgttaaacttgcaatcagattagccatgcttttctgcttataaatttcattaggctgcgcatcctctcttaaagatgccatgtaagacaaatgattttttgcttttaatttgtctctcactataatcgaatcatctcttgaaaatccatccttctgtttataatcgcaataacaatttccctccagataatatttacgcttctgatgataatatgtcctcgatgcagttaaaataacaagtttcttatctcctatatttttcgtaaatatcctttcaatttcttcataatagaaacttgcattgtcaatgattatcgcaaatttattgtttgcacttgtatttacataattaataatggactgtgtattaagataacggcctctatattccagaatatcgtatcctttattttttatataatatcctaattgtttaagcaaacatgattttccggaaaaatatcttccataaatactaaaacaatatatattgctatctttttctaataactcatccaatttatgtactgcatttttttaattggagtcttcaaaagtccagccatcatacacatcctgccatacacaaaaattcccttcgtacagcttactttcatatggctttttatataactttacgatattatcaagcaaataaattccgttgtaggataaatccattttcgctctgtcaagttcatccggctgataattaatttctgcaatatatcttaaaaattcttcatttgatgcctggattaatactgcccctaatttttccacttctttcttcaggtatctggaaggtttataatcaataaatactaacttgttattcctatattgacatccagcatcttcatatattttcaaataatatttaatatccggttcatccatccttgccccaataaatataacgttatccctttgaatatcattcgaaaatttatttaatttcgcatccagctttctggtaatcagttccgtatattcatcttcagaaaatataacgccctcttccatatttctaacacagccatgtaacttaaataattgtgttgactttgaattcgatatcagcctctgtttattttgaacaacgatattctctccctgttcctcatagatattttctaccagatcatcaatatttaccgtatatatatttttccatggatatttcactaaataatcatgaaactctgccggtctggtattgatatacatttcatgcaataaattatataattctgtctttccatgatatatacgatatatctcatcactcagctttctcagatcatagccttttacttcttcctcatcttccggaccaatcttatcttttgccaacgtatcataaatatattccttcaatttgcaaccatccattgcattcgccttattcgaagctccacatgaaaaaccagctcccaaaaacagaattggtgtattatccgtcaataaaatactatttaacagttcctttgctccttctaaagttttttccatttataattcccccatatctccggatcaattcctcatttgtaatttattttattatagcacaagaactccccatatgggaagccctcttacctgctcagtctttctattatactgtactctttccaaataccctaatatactcctgcgctgcctgcgatgaaatatctaattttacctgcagtctttgtaaaatatcctcttccggcaaaccaagatcataacaagtatctataatcccttctgcttttccacgtgcttctccacgagcctctccctcttttgctgtctcctcaaatacactccacatactgtttcctccctcctgcttcaacgcagcaaaatcaatcttacagttggcagctccagccaccgttttaagtatcatgtcgctgacttcatgctcctttgtgtattcaatcgctttttcttttttatctcttattgaattattttgatctaacaggatttcaaacagattaaataaatcctgattgtttccattatgaaaatacagattgttctgtcttgcttcgaccaaaagcatccggtaatcattgacatacggtgccatctctgccggaatatctaaaatcccatgtaacgatgtcgctgcatcccatactttttcgccatagtagatcacgatcgtgacgaccggcaacagacggtctgtctttttcattttggataaaaattcgtgctcgtcaagtcttgcatcctgctgtgctgactgctttttgtattgtctggcattattattatactgtttcttataagtggcataatcataccccataacacgaagcggcatggcataatgaatatgttcctgcgactctaagccaagtaaaaccagctgcacaccataggcagttgactttttcataatcttaatattgtccctggcagcctttacaccctcagcctgcttccggtgctccaataccacagaatcttccgtatcttcgttctccagttcatctgctcttatgatctggctgcctccaaataatactgcattaaaaagatctgcaaattcctcgttcccactccaataatttttcagcactatgtccgatgacacacctttttcttttcttccgataatattctcctcctttgtgtgtgggagaatattgtcgtttcgaattctcccttttttatttgggagaataatgccgtttcgaattctccctgcttttgggtgattaaaagcattgaaaattcttatatgcgggctgtaatctggtcacttgtaaccatctgcaacgccgcgttgaattgatttttgaatggctttcgcctgatagatgattagaatataatgctttgaggcaattgtagcacattacaagaagtttgtcatttaatttcctgaattttaagatttttcataaaattttatattacaaacttcctctctgtttataaaacaattcaactattcttttaaacctcatttttattttcttccactttttcccgaccataccgggtaaagattttatttttacattcagccctacattataatacttatatattttttgttcatattcttctaactggttcaaatcattttttaattgatcgattttatttcttctttctgctgtcattgttttgttactttcaattttcagacatgcctttatttcctttttatatgtcttaaacaactttttcaaagaagaaacagtagttttaacgttatcaacgtcagtctgattattttttatatactgatacatttcctccatatttgttttatataataacaaattcgtttctgtttcatttaaaattttctgtctgctcgtatatattttcacacaaaatttacgatatttttcatacttaataacccaattccaaaaaatctttatcgcctctatatagcttaaaatacttaccagagaattcaataatggttcacctggaacaactatttgcaggtaaccatttaacaaaattggaatttcaaacaaacctatcaaaatgaccagctctactgtcaatactttaaggaacgaatgtactataaatttctcgcctaatgaaatccgaataagatccgccacaaaaattattaactttataattccatagaccattaatgtatatatacttactttacctacaactgttatccatgtataaggcggatactgacctatatgtagatataaacaacatattgctgaatttataagtatcattgtcaatatttctacaaaagcctgcgaataaccattcacttcgtttttagacctgtcccaatcttctttaagcattattgatatataatatattaatagttctttgtgttttttgaaatcaccttcattatctacttttttaacttgatttatttcatcccaaatataagcatcttctttaatatcttttttgtttccccagccacacgaattgatattcaattccagctccacaagatacttttcaatatttttttcatcctgtcctgaaaactcacatgcctgaattttttcacttatcaaacgaattgtatcccgccactttttcctctcctctgttatatacttcaaagtattattttttctgttattatactggttaaatatagttgtgataattgtacttgttgttgactccctaaattagcataatactgatctgcttgcctgtctctggaatgatctgtatactgtcattagtttacagaaagaaaaaggtccccgagcaccctccgtgacaagtcgtgtgctctgagaccatggttaaaaaccatgattattatatcagactacacactggtcctcaaggaggattttggtgtttttgttgagagcagtgagaactcccatatttgtcccgtatgtcagggaacgctccactacagagattccagaccacgtatccgcaaaaaggaaggcggcactaaggagcagctgatgattcgcaggttccgctgtcagaactgccatgcttatcacaatgaacttcctgactgccttgttccctataaacactatgaggcagaggcgatcgccggtgtcctggacgaagtaattcttccagatgacctggattctgaggattatccatctttcagtaccatgctccgctggcttcaatggttccgtgaaaacctgcagcgtatggaaggatacctgcggacagccggatatcagatactgaatctgggagagggcttcctgttttcctctgactcgctgctcgacacgatcagaaacagatatcagaactggctggaacagcttctccggctgatctataacagcggcggatttctggtgccggtccgctggtagacctgtgcacctgctttggttcgtctgtcatgctggccgatagtatagtggccttagaaggaggtagctataccatgagtacagatgacacatttataaaacagcagtggcaggatcaggaagcccttcaccgtttccagctgatctcaccacttctccagaccggtctggatgatgccagacgcctgcagctgcgcagaacgatcgctgatgagaacaacatttctgtccgcacgctctaccggtatgaaaaagcctttgcagaaaaacagttcgcaggtctcagaccggctgaccgtgaaaagcatcgttcccagagtcttccggaaaactttgagtttctcctggaacaggctgtccagctccgcagggaagttccggaacggtcagttgcccagatcatttacattctggaagcagaaggtcttgtggctcccggcattctgaagcgctcaacccttgaacgccacatataccgggctggatacggtcggaaccagatgcagatgtataaagaggccaggaacagttcgtccagacgtttctgcaagcctcaccgtatgatgctggtccagggtgatatcaagtatggaccgaaacttcccattgggaaaaatggtgcaaaggtacagacctatctgtcctccgccattgacgaccattccagatatctgctgtcctcacgattttacgataaccaggaagaatccatcattgaggataccttccatcagaccatctccagatatggagtctttgatgcctgctactttgacaacggaagccagtacattgcaaagcaaatccggttctcacttgcaagacttgggatccgtgtcatgcatgcaaaaccacgttccgggaaaagcaagggcaagattgaaaagttccatcaggtggtggatgactttatccgtgaatcgaagcttaaaaatatcaggacactggaagaactgaaccgtctctgggctgtctatctggaggaatactatcataagcagaagcatgccggtatcgcagaatactacgaaagccttggagccgctgttccggaagaagggatctccccacttcaggagtggaaccgggacagccgtccgctgacctttctggatgcagcggtggtatcggaagcttttctccatcatgagcagaggaaagtcgaccggggagcctgcatcagcttccgtggaaaacggtatgaaacgaaaccttccctgataggacacacggtagagatctcttatgatccggcagccccggagcagatcactgtctcctatcagggaatggaactttttaccgcaatgccggttgtgatcggtccgtattgtgataagagtccggccctgcctgcttccatgcaggaacagacccctacgacttcccgctttctggatacactggaaaaacgtcatgaacagaaccggcggcagatggcagatgccatttcctttgccgcgtaccggaaggaggcggatgactgatgtatgaagcattctttggcatggagcacacgccatttgtccgtgatgtcccaccggaaaagctgtatgaatccaatgcattccgtgagaccctcggacggctgtcctatgtggcagaccgtcagatgtttgccgttgtaactgcggaccccggatgcgggaaatcaaccctgatccgccgtttttactcggaacttcccaaagaggattacattgtcctgtatctgtctgactcaaagctgacaccacggtggttttataaagggctgctggaccagctgggactggaatcccggttttaccgtggtgattccaaacgccagctgcaacaggagatcgagatcatccggggagtgcagcacaaaaaggtcgtctgcatccttgatgaagctcatctacttgaaaaggaaacactggaagaattccgttttctgctcaactacagatttgattccatgagtcctatggctgttgtactggtcggtcagaccgaactgtgggaaaacaagctgaaactgcagcggtatgccgcagtccgccagcgcattgatatgtactgtaccctgccacacctggacagatctgagacagaacagtatatcgcaagccatatggattactccggatgtacccaggaggtctttacagccaaagcgctggatgagatccataaagcatcggccgggatcccacgtatggtcaaccggatctgtgaaaaagctcttatgtatgcatttcaaaaccagaagcgcctgatcgatgattatatgatcaagttcgtcatagagcatgaaatgcttggaaccataacaacgtaaagattattgccgcctggattcaggcggcagccctgtggggctggctgatgacagaaaaccagtcaatctgatgacagttcatgtgagcaaatccgtgacagctcatgaggtcagtaacaactgaattgaaattcatggattcgttcagaccacagcgtgattttttcatctgttttcataatgatacagtttcctttctttgttatgaaaagagtgtatcagaaaaatatagttgcggacagatacggatgattacgtacttacaaataaacaacggcttaatagcagaaaccgctgtcaagccgcatcaattatcatagaagatctaaatttacagaaaaaatttcacaccggagggtgcggagtctggatacccagttgtaaaacgtagctggacgaattccgttttcgatgcaccactgtgcatcggttttgccgcttttgcggcattccattacaaatttaagctgctgggcagctgaagtttttgagttacgactcattgatagatacctcccttaattattagagtaaaacgctcgctttactatcaataattatggagaatatagaagaattaaacaatccgcccgattattgggcgcttaccatgtaacccatgggtcaccagacaatgaaattatttttccatcttccaccttaaagtcttttaaattttcattttgttttccatagaactgttcttgacttatttttatttcgggatactttttactcattatataaaaataactttcagagcaaatcaataatacaaacaaactaaaaatcaataatattaattttttttcatataatcttactttcctatgtaccttcattcctttttctcttttagtaaatatacaactataaatatataaaatggaactaagtagtactgtgccaatccatatctctgccaataagcatatggtgttgcaacaaaaagtgttatggcaagccccaatgtcggtgcaattgccaatcccagtccccatttttgcttttttataattaataatactattaaaaatacaaaccatgttagtatagcaagtgccacaggtgcgtctcctatttcaaaaatgctttttaaatccactttttgaatttctaataaactgtgaggaactataccataattttctccattttcaatatctcccaaatttcctttatatatattattagcatctgtatttaattcccaacggtttaatgcccaatatccatatgtgttaagcgcccatgcttctatatatgtatatggatttcttataaacattgaaatatatgttttcataaatccgtttaaatgctcatttaaatacttctgactaaaattctgatcccattttaaaagatctactacacaaggtcgatatgtatctttataattttccaatggtaataaaccattcatgtattctctatcttcctctgtcatatctccatcatatgcaacaacactcgccatttgatttaaaaatatacccaggctctctaccggctctccatttaaatctaattttgtgtatactggtcctataacaatgcttataatcaataaaatacaacccgtacttaccataagttttttcaaacctgttattattttttttctccgattcaatatccatatcaaaattatcactaattcgcaaaacaatccgatataaaatccattatttcttgaaaaacataataccactaacaataaattactctttaccaagaaaaatctattatctgatataattttccctttagataatgcaaaatctgctagtacaagagaccatacggccaacgttgatgaaaatattggatctttccacatagcaatactattctgtgcaaaaaaaggaatacaaccaaaaaatacagttaaaattatacatatttttataccaatacctttatttctaatccaacatatctgatatccaaggcacaatgctatataaatcatctgtacaatcgtatacaccgcacaaccaaatgtaatatcctttataaaaattcctagtgataagcacattttcaaaaataaagtataaaaaatcggatgatgattatataatttggctacaccaagtgcctgtgcaattgatcccagtgaatctccaaatataaatcctggatagtatatcactaaataaggtatccataatataaaaattatcagtgctgctcctaaccatgcctttttattactaataccatatgtacattttatttcaatactttctacttttcgtgtaaatcgtgtaataattttttccaataacgctgttattgttattgttaataataaaaaagctattacatcatttactgtcaaacttgtcatataattctcagtcattaaacccgtatacattgaaccatgtaattccatatgatatcctaaaatgacagcaatacttaatatacccgaaaaaatcatatatggaatctgttgtttttctaatctccaccctgaaaacaaataatacataataatgaaagcacatgcccaaacaatccctgccttaggcaatcgcatatattctataaagtatctcccacataccattgcaaacactattacagcaattttactgattaacactccacgttctactgttttatcttttatactcaatctataccctcctcagtcaaaaacagattccttccgcactgataaaactaaatccgttttatttaaccgtaaagaaactgcttgcatatctattccatgactatataagtctactcttttttcaataagtctttataattcatttccattgtattaagttccgattcaaattcctgtctgtttttctgtgcaaaagtatccaatatcattccagagaaaaaactctgtaatgcagccaagacaataaaaccggatgctattagcgtaggaaatcttggtacaagtcctgtctgaacatatgtaacaaaaattggtacaaataaaattgctgctataataattaaaagcaatgataaaattccaaagaaattcataggtttataatttttatataaacgtccaatcgtctttaacactttaaacccatcactgtacgtattgagtttggattcacttccctccggtctgtccctgtattcaataataatattactaatctgcatatttttatcaactgcatgaatactcatttctgtttcaatttcaaaaccttttgacaataccggaaacgtctttacaaactgaaaactgaaagccctgtatcctgtcatgatatctctgatgtcacttttaaacaaatgattaattgaaaaccttaccaaactatttccaaaattatgaaaaggtcttttattttcctcaaaataagttgaagataaccggtctcctacaaccatatcagtcttcttttccaaaacttcctgcatcatctgtctgccatattcaacagggtatgtatcatccccatctatcatgatgtaacattgtgcatcaatctcccgaaacatcctacgtattacatttccttttccctgtttatattcccgtcttacgaccgctccttcttcttttgcaatttttgctgtgttatctgttgaattattatcgtaaacataaatcgttgcttcaggaatttctttcttccagtcccttactactttgcggattgttttttcctcgttataacatggtatcaatattgcacaatattccatcacttttctccttatcgtataatactttaggcatttgacaaatgccacaagtccttggttttattgggttttcttgcttgatttatataaattttctctccacaaatggtaaaatatagataaccacaccaacaatttcaaccacctatgaatgagaaaatttatgaatgctaaatatcccccttcgtttttccagctccttcggagtattttgatttggacaaattcattcctaaaaaaactttaattgcctgaaaaacttttcaattgtcataatacttatttgggcttattaaaattcgcccaaaatctgatgatctatgtcaattcagaaataattctgaatactgaccctttttatctccttacctaatggagagttatccacaggaatcgataaaaccatttatcaattacctaatataatatcttcataaaatttttaattcttacttttatcatctacattctcatatattaaaacatttctcacactgtatcaatacattgtcaacttctaagaagcttgtttttcaaactcctccaaaaatatttccacataatcctcggactttcctgctgcagctttaacatattgttctctctctgcagctcatcaatgattcttactttttcatctatagttttttcctctataactttggtcttctcatctacaattcttgtcttttcctctattttcttttcattctcttcccttatctcaccaaacatattcagatatacttcatcctgcatgtcaacagtcacgatatccgataaagatgaaagcaatgtatccagccagcatatatgcgacgtaggcgaagcatacactaaaacctctattttatctttcagcatctgcttataaaaggcattgcaccgtgcctcataatctccccagttagcactgacagcatccggcagatacacgagctcctttccatacttatctgtcccctctgtcaattctttccgatcctgatccgtatataatatgacatcatttcctcgctgtatcaaatactgcatacactccagaaccttttcatccatattgtcatatcctaaataacgataataaattgcaatttttttatgccccgttatttttgccctgttatagatatcctgtccctgttcaaaatatactcttgccaccgcactggtaatctcatcaggtctgaaatattttcttaaaatctcaaatccctgctgttcgtcctttttttccagcttattatgccagcagtccacacaatcccacaatatcttgtccgcaaaacattttgattctttccggaacttttcaattgatcctgttttttcaagaaatctctttactaactcagatgcctctgcaccggaacatcttttttcaaactgatccagtgataaaatatctccaccagttactcctatgcccagattataattataatatttttctattatgccataataattttttgcatagtacatgagaaggaaaaaaatataccgatcctcagatgcaaccagtctgatctgttcaacatttgcaaatgcctcttcacatacttcccgtctccagatcttatttgtaatattaaagtcaaacttttcatccacaaaacatttttcaatcagatttccttccaattctccctcatatggcgtgaggaaattggtaacccagttttttaaatcatccgatacattctcatttgcgtgtaaaaccgtaccaaaatgcaacacatctacaggatgttctgtaagcagttttaaaagttcttcacaggcagatacttcaagataatcatcactatctacaaacattacatactgaccagccgcatctgtaatacctttgattcttgcacgcaatgtccccatgttctcatctgcatggatcactttcatacgatcatcccgtgcagcataatcatttaaaatctttccggacgcatcttgcgatgcatcatctatacagataatttcaatatctgatagtgtttgcgacagtaaactgtcaatacactgttgtaagtacttttcaacattatatactggtatgataattgatatttttgccatcttttttccctcaaaaaaggactatcgcaatcttattttgacagccctctttttctcctataacctttccagttcctgttttagcttcgaaaaacttatcagacgatccggatattgttcatctggatcatttaattctctttccgcagcccgttttaaaacttccagcaaatcactatattttacttctttatgtttctgtaaaaattgatacaaatatctcacaactgacctgctatacattttgacatcttcacggattccaaggatgacatcaataatttcttcaaaatcatcgttctccatatcatcccataaatcttccatattatcctcagatctgctttctgtcacctggtgtaatgcatttatattttgcataaatggtaaaaactctttttcatcaatattctcaataatgaaatttttgatatctctcactgtcacattcgtttctatcatattgcctttaaatatcgaaaaaaattctgaatatttttcccatacctgttcatgaactataaaattgaactggatttcttctctatctttgttaaaaaaagatattaaacctctgatattttccattacctgttctgcattttcctgaagcatttcttctttaatattgatcatcaaacgtatttcatctgtcgtttcatattcctacttatctttctctgctctcgatacaggctctcctttttttgaaaaaaacaaaacagaactattgttcactttgtgcgtaagcatatccagcaactgtgatacagtagttatctccggctgatcaccattccgccattttgcctttttgttcaaattttcgatcagcagccgaatcagttttacacccactatttcaatattactatttttatcttttaatatcgcagtacattcccgatctttttcatcacttacaactgaatatatagttgttggaacatacgcattcccccttttttataccttctttttatttgtgtattccgtatgccaaacaattcttccctatatcgatattttaaaaacatatttgcttcttgattcagaaactgttctacggcaagaaatcttaccaaacgctgtttttctataaacatctgccctagcatttgctctttcattccattcataagcaactttttattacgttctattttttcattattcaaaatataatccgaaagttccttataggatactaaaatatccacactatcaatcggatatcggttacttaacgcaatctcttgtttataatagaccggaatcaaatcttcctgtgcaacattcagtccttcaaacagacttctcgtcttttttacaccttcctcagacgcaacaacctttgacattgcaacggcatatctcttctttcctatgttctgcattaactgcaatgccatatttaaaccttcgacattttcattatttggatatgcaataaatatgacctgatttgataatgtcaaaagagagagcgatccccattgattaaatcccgctctcgtatcaatcaaaataatatcaacattcagttctttctgcacgtacgcaaatatttctctaaacacatctttttcctggatctgctgtgtctgtaaacgttcaatctggtaaacataatccttattcatagatttcaatgcaggcattacaaaaatttcaccagaaacattcttcaactgaagtgagcagaaaatatcatttattctgacatcttcacttccctgtataacttttctgtacagatactctatagttccgtactgtactccgttgatttcatcatttactttgtcataaaaaatattgtgcagacttggtgcctcaacatctaaatcaagcagtaatacccttttcctgcatctgcaagattatatgctgtttcaatcaaagcaattgtcctgccaactccacctttatatgaataaaaactgatcacctgcgtctccgtcttgttctccttggcaatattatctgcatataatgcatctgaccaggataagtagtcatcattttttcttatcttttcaatatggagttcttctgcctgctctgtggaataaatatttataaaacctatctggtcactatctgatctcttgtctaactcttcttccagcagcttttttatatcagttctttttatattggaatcagatacaactgtcacatgaatttttccccttttgctcacgcttacctgtacccattcatcccctttcagctgatatttactttgaattatttgttctatgttttcccagattctttccatctctacctgccttttcacatccattaataatccattgtgattgattcgtgcctgctgtgacactacattgactacataacattcctttcaacaaacactctatatagattccacctaaatgaatcgaacaagctttacgtctattttctcccttactcagtacctcccagtcatcaaagcgtgatactgccgcttcttcgtacttttccatttacttctcccttgtatcaacaatagcattaccaatcgatcacttcgaaaaattcattgatattagatcctcgtctattttcattatcccacataacatccatcttagatattgtaatttcaaaattctgtttattaatttgataatgattaactattatcttctctctcagtcttgcaagcatttgcttatatgaatttccctttgtattaagataatcatatacatcttttttggctttgaaattatcaacatctccaaattccaatgtctgttcaatatatttctttacattctgcccattataattatcaacatgcaaacatgcaatatactcaaaatccggattatctataatcaaaaaatgcggtattcttttactgatattttgaagtgcacaatatcctattatttcttttagtttctgcaattctcctatattcgttttaactctgtcaaaatctattataataaactttgccagacaattattacttgcctcttttttgatttcttctaaaaaacttgaatatcctccaccatgcatattcacgggtctgagtgctaattctaccccctgcttcaaacgcattgcatcaatataattatattctgtgtctccttcacaaaatataacaaatttttttcgtaaatttctctttggtctactcaaacgcagtgcctcccaaaatccctttcatataaaattcgtatatttttgttgtatcatattttatctcaggaaagtctgctaaagaatacaattcagaatccaatgtatcacgattttttgtaacaaaataaatctgttctttcatataatttttcaaatctaaatgcaatacattatggcttgaaaaaacaaactgtcccttatgatcttttccattaataaatgcaatcatccgctctgctaatatcggattgagcacccgatccacttcatccgcaaaaaccatcttattttcatacacaaccctgaaaatctgaacagcccatgcaaagaactccccaacacctcctgaatctcttctaagctcccttgatagaatatttccatcttttgtttttctgataatctttgtcatactaaatggtttttcatcatctatctcaattccacaaatactgtaatcaaccatacgtaatatctctaaaaaacggtcttcttttaaaattcttaaatcgtcttcttcattttgaatatttttgtaaagataataattataatttttactttcaacgacgagtttatcattcatccagttaacaaattctattgcatgtgaatccccaacaatggctaatttcgatacaaataatcccattgctcctttattatatgctgtctgttcaaatacagtctgtatctctttatcacaattatctatctttatctcaaattcaacagccatagaagatggcttatccccaatctgctttagatgctctctttttgcatatattatctttttttcttttccggttttcgactgtttaaaagaaaaactttcctgcacaatacaaaattcatcaatctgcagattataatgatatatcgttccactttcaccaataacacttatatcaaattcctgctttgtttcacactcagccggacattcagactgcagattattaatattgatcagcgagcgatacgaatgttttaccttgttatcttcaaacatacttttcagaaaagaaaggctgttaataaagtttgtctttcctccggcattttccccaatcactaccgcagtttttaaaatatcatatccctcttctgttttaacataattatccgggaatctatgttttactttatttccaggtgccatcatatcaaattctgcttcttcagcaaacgaacaaaagtttttaaaccgataggatattagcataaaatgtcacctcctatttatattttagaaaaatcttatttttctttcaatatgattcagaccctcaaatacctgctcaaaatttgaccatattttctgttcatcttccatgattgcccattcatgtgtaaatactgtaatcggatactttttctttatcagatagtcccgtttttcctctatagattcttctttttccattcttaaccatgtaggcaaaaatttcacaccaagttttttatcataatattttccatcagaatataatttcgttcta

SEQ ID NO: 5176 - DNA, 18847 bp, Unknown
  gut microbiota DNA sequence
ttcctaccctgacaggtcataccgcaattacatacatataatggttccattccaagatcctcgcaaagctgcagatactcgtgaaatccaagtccgttactgctgcggtaatgccatactaactgctgccccggtctctcccataccggtcctactgtattacgaaatagcatgacagtggacggcgtcgaaccctctacaatacatccccctgggaacctcatgaaactcggatgcagatcgcgcagtttttcaacgagatccacgcgtaatccatgtccattataggttgttcccggcatcagagatgtaaaaccaaacaggatctctccaccatccggacaccgaaatataagcttcgcattctgactgtctcctgttgcggcaagtactgcatcgtactttacgtaaccattccctttcagcagcaatgttgtggatgcaaagcacacattattttctatgacagaaacctccaattttgtttcctgggctgtttttgcaaacagacagaatttatatgcttccccttttttctgtgggataccgcaaaatcctatattccagatgcttccacccttttcaaaccgtacattcagtgccgctttccggtttttgttcaaagtgtccgcctgttctaaccgcatgcgcgcatcctgtgcataccaccccggtacagacgttttttcaatttggtcctcctctacccagctagaaagtccttctccgccattgaattcatcttcccatccggaatctgtcacaacatgaactccatctgcccgctgcgtatatccctccggaagaagtgaatcttcaaagcatctgtttcttatcatttccggatagattccaccatctccggcccggttgatgtcttcaaagaaaatcccatacaaatcttttgctgtttcaaacttcctgtttttggtcctgatatttagtctgtccatactttatttctccttttttcttccctgataccccaggttatctctctttcctgcgacaatctatctcataaacctttccctttcgcatctctgcaaatggtcctggaattaccttccctgcttctaaagcatttccataaaaatcactctgcgacagcgtatggatatccactgttcttacctcctccggattgtatacaatatcccgttttgccagttctcccgggaagccaaatggacgatcatctgccttcttgaattccagcttcagatgatcggtatccacctctatctcaaaccatccttcctgtccttctctgtcgaactgataaaattcctgccaggatggaagatgcagacatacctccggttccggatacagaattcgcagataacctccctccattccaacgtaggtattaccatcacaatggttgtcctttgtcgggaacttcacagcagcttccccgcaacggtaaaacaaattattcagaatccaggcatctctcgatgtaccgcctctttccagaccatgcatccggaaagataccggctttgcaaaatatccagcacttctgcaattcccgatcaaattatgttcgatccgcagtctgtctgttccttccccatagattccatatccattcacctcaccagattccgtcattgcgtaccagccggccgaccctttctgctcctttatctgattccggtcaaaccgaccttccacattccagatgatattgtggtcgatcagattcacaccatctttcgtacattctatgaaaatagcctctctctgctcccttccatctaaaaacaggttatgtgtaattctgttattttcatttccacaatccatccacagatgatctgcccggaatgtattgcggaacagatttctgcggatcaggctgtttacactattgtgaagcttaattgctcctgcttcccaggaaagttccatcttctgccatccggtttcttcgatccggttatcctcgatcaacatatgcactgcatgaagccctgcaattccacatacccctgcgttggaaatcgtacagtttctgatcacgctatatccgattttctgccccggtatcatctcatgatgccagcattcatttcccacatcaatccctactccgtttgaccagtctactgtacagtcctcaatgatccagtgatgtcctctgtaacaggaaattgctccccgctgcggtaccggagcccctgttgccgcatgtgcacaggtcagtccttttacttttatataagacagaaatggttcgtccggtgcaaaacactgttctctacaggttacttcgattctatgatccgccggatcttcatcattccaaagcctgaagtgcacacgctgtccgttagcttccacccagtacgttccgtctttttccccaagtccattgcaaagtgaaacctgtgtaagcggttttccatcgcagaacaccatccctctccggttcagataagttgtcatatctgtcttatcatactcaataaacagtctgtcatgtaaaatgttcaccgcgcagaacggattgtatcccagaaataagttaggctccagacagtattcccagacctttatcttcgcttcctctttctttttcccaaaattgttatacagtctccagccattacttggtctgaagttctccactttttcagaagccttgatcacaacttctccatccccgtatgcttcatagcttatcatatgtgatgcattgatacctccacacaccggatgtacccactctctgtattctcctccatggatcaggacacgcgttccaggcactgccctttccgctgctgcctgtattgttttaagtggtgcctttaacgttcctgcattcctatcatccgcatccggatgtgtgctgtttacatgcaatacgatgtcatacactgtctcgtcttcccaaaattcaaacatgctgccatctggcagttttgctgtttcccccatcatattcctcctcattatacaagtatttttctgttatcttttgcaaacccatattatattctctttcaagtgcaaaaacggggacagacacactgtccccgcttcccttcttcacgctctgtcttcctgcccggaaacttttccaactgttatttttttcatccattttccacttcgcaaccggaatacacaccagactgcttttagaatctgatcggctttcaggcacacatatatccagaacgccgggaagtggaatacaaaccccgcaagcattccaagcggtatggaaacaacccacaggaaaagattatccgcaagcatcaacatctttgtatctcctcctccacgcagcactcctttggtcataatgctgtttgttgcctggaaaataagaatcaggctgatcgcatgcatcagctgcgcagcaacctccgctgtctcctccgataccttataggaaccaataatcgccggactgactgccataataaagaacgctgacagcattccaagtcccagtcccaatcctaagaatctgtaagcctgactctgtgcctgctcttgctttccctctcccagcgtctgccctgtcacgattgctcctgcctgacatactccctgtatcataacagtactcagctgttgtgttacgcttgtaatggcattggctgccacaaaggtaactccaagtcttcctatcaccattgccactgtattatttccgatagcgagaattccgtcactaatcagtaccggtatgctgatccggatatattctccaagcagatcagccgtcttcatgccaagatgttttaccctgaatccgattttctcatctttcagtaacagatatccacagatcatccctgcctcaaacagtctcgcaatcaatgttcccagcgcagctcctgcgattcccatacgtggcattccaagttttccgaaaataaatacatagtttgccagaaggttcacaaaaaacgctccgattgaaacaagaagcggcagcttcacctgcccgacacaccttagtatgatcgtacataccaatgaaagacctaaaaagaaataggtaatcacagaaaacctaaaatagatttctcccagccgtataatctctgcatcctgcgtatacatccgcatgacaacctgcgggatcagcaaagtcaccaccgcaaataaaagtgcaaggctgactgtaattcttactacgatacaaattgtcttacgaagggcctgtatactttttaccggttctgcttcctgcattccccagtaacgggatacaagaacagatgctcccattccaagccccatacagaaaatctgatagacacctataaactgatttgccagtgacactgccgaaagtgacatttccccgagatttccaaccataatcgtgtcaagcatgttgactccgattgtgatcaggctctgtaaggcgattggcaatgccagccaaaagacttttttataaaatttccagtcgatctctgctcttcttctctctgctcttcttctctctgtcatcttctatctccatttccagtagtaaacccttcctgatgttcagatttttcttggtcctttacctggcaaaactgcgctgctctttgcactacagtgtctgtatccaatccagatatttcacgatcatcgtatcccagaccttccattcatgtccgcccggcatctcttcgtaataaatcttcacattcttctctttgcagtaagccaaatatttctgtgcgtgtgcataacctccatcttccgtgccgatagctccaaataaggccggatattctcccgtctcagatgcacgatcgatccacactttcgaatcgctgtctgttccggcaagttcctctaagcttccccagcatagcgaaaccacatcgtttttttcctgttccttatcctgataccgtgctctctgctctgcaaaaagttccgtcacaaaggaaagaccggacagatttgccgctgccctgaaaaatccaggttttgtaaatgcccatttgtaagcaccgtatccacccattgagaaccccgctacataacggttttcaggttccgtattgaccggaaacattttctcagctaccattggaacttcctctgtcacaaactgataatatgggtatccatatttcatatcgctgtagaagcatccaccatccacttccggcatgacaactgcaaagtttttttcctccgcataccgctcaatggaagaaaacctgatccagtcctggctgtttcctccaccgccatgcagcagatacaaagtgcctgccggctttttcccctgattgacacaccccggaaggatcacatacaatttggtgtgatagcccagcttatctgataaaaaatcaaacattgtcactcccatctcatacatcctccttcatcattttgtctatcatgaccggaagccactgatcccagaagccccactcatgcctgccttctccttcagagaactctaccggacatcccatcttggttgccacttctgcaaaattttttgatccttcataaaaaaagtcctgtctgccgcagcagctatacaatcttggtagttttttcccttcttgcagattctttcggatcaggtgataaaaatcattactgcttcccctgtactcttcccttgtcccgaaagctgatgcaacattcggattattcatatcaaaaaatccaaggctctccacctctcccgcaccgctcattccagctgccgctgcaaagaaatccgggcggttcaaagcccacttgaaggttccgtgggatcccatggaattaccgatcacatacctttctttcggatcatgcgtcaatgggaatatattctccacaatctccggaagctcctcgcttaagtatgtaaaatatttttttccatgtaccatatcgcaataaaaactgttgcgtacttccggcatcacaactgcaagatcacgctctaatgcatattcttccaatctggtacggcgcagataaaggcttgcatcatcactgcctccatgcagcacatagagcgttttttttctctcatattctttataataagtttctgccccttttttctccgggtcacgaaaaacctcataagtcggaagaatcacatagatttctgtgttttctttcaacacttctgaacgaaatgaatattggatcagtgccatttttctcctcctgttctactcttcttccttttcaaaacacaatacattccaggaaagtggttttaatgatgttgtcagtctgccatctgcgaacaaaatatcttctttttcttttggaagaaccaaagatggattgtcaaagctgctcgaagcctccagatcatccgtatacatctcgaattgttttacaaacctgtatccctcaaatcctctgacatccacagtcagagaatactcactctcctcatttctatttaacacaaacagattcagtctgccattctcacgatcccatgccgatgcactgtccacataaggaacattttcttttcccctgtactgggatgtatcatcgatcgcatatcccggcatatcataggtctcacattccacgcttgtctgcatggatgttccctttgcatactccatcagctgcgacagtgcataataagatgctgatctccacacatggtcatggtcggaagaacagagtgctccaagtcctcctgtcatgcaagcaatcttcacacggtctgcatgtcttaaaaatgccatctgaattgaaaccattgccagcatctgcagcatatctcctcccggatgttttctgtccggcatctgatctggatcatgaagcacatattttctgtccggatcaaaccggtagtgggctcttgtcatattgtagacaccatagcccggatgcagctcggcatttggccggatcatggctccgtactcgtcaaaagagagcatcatttttttcggtgaacgcctctttgctgcaatcacatcacaaagtgccgcctcggtgtcaataaattcctcataatacagggaaccacccagtaatgccttaatatctcccggaggcgcactgtgatagtggtgcatggacagataatccaccgaatcatagcactgttcgagcacggtctcttcccattccggatagtgatccataaagatggcagaggatgcgcagacagcagtctctatcgtcggatcaatccacttcatcactttggatgtctcattggcaagaactccgtagcctctcggatccttatcccaggaaccgatttgccacggtccgtccatctcgtttccaagataccagaccttcaccccatatggcttctcatgtccgttctttttacgcagatctgaccaccagctgcctccctcatgattcgtatactcaacaatatccatcgcatctcggattcctcctgttccgaggttgatcgtatacatcggttctgcttccactttttctgcccactgtaaatattcgtcatgaccaacttcatttgtaatatactgataccatgccggatctaaatgtacttttctctgttctttcggtccgatggaatccttccagtcccaggcggaaacaaagtttccacccgggagacggattgccggcatatcggtacttttcaatgcctcaatcacatctttccggaatccttgctcatccgctgtcggatgcttcgggttgtacatcgttccatttaccattgttccaatcggttccagaaatgttgaaaataatctcggtgagatttctcctatctcaaaggatggatggactgtaatttttgcttctttttccatagtcttttctccttcatttcactgccatacctgtgtcttgtccccgcaaacacatttaaaataattttcttaaaaacgcattcaggcaatgtctccagaatgtccagtcatgataaccgtatccttcgaacacctcaatcgggacacctgccgccagtacttctttctcgttcttaaccgtcgactcatagctccattcctgctttccacatgcaacaaaaagcatatgaaactgctttctgaatgcttccggattcagtaatacttctgtataatccacctcatcgtccctgatcacaagaccaccggaaaagatgcctgcccagccgaacaattccggataggtaaatacgattctctgcgtctgcatgcctcccatggaaagccctgctaatgccctgtaatctttgtctgcaatagtccggtatctgctgtcaatatacgggacacagctttccggaagctcctgcagaaatgcgctcatagaatggtgatattcaccattttccgggaaggcatagccagtattcataactacgatcatttccttcatctgcccttttgcgatcaggttatccgcgatattggcaagctttccctgccagatccagccaacctcattctcgccgcccccatgttgtaaatagagaacaggatatcgtttttccagatgttcctcataacctgctggtgtgtatacataacacagcttggttctcccggtactattagatttgtaatattcataatgaaccgttccatgtggcacctggcggattctgtattcttcaaaatcctcctccggcatttccagatagttcacagcctgaaagccgccgtagccaaccggcgcattgcagtccaccgtgttcgcgctgtttactatatagttataatagtggaatcctttctcaattcccgttacctctgctgtccaccagccatcctctccttcttccataggatagcttttcattccccacagattcagctccacatcatgcgcaccgtctgcccgcagataaaatctggcagttccagtcttcccatctgtcacctctgcgcccggatgttcttcccggtatctgccacacggtctgcctttctcatcaaatgcatgaatcagacctttgtggatcggatcagacattagcatatgctctgcaaaagtctgacggtctaattgctctttggatagctttctctcttcataaggaaaaactggttcactttcatcctctggctcctctttctggaagactaaggatgcaaagtccctaaagctctctctccacacatgccattcatgatagccctcatagcttcgctgccctccggctgccccgagcttttcaaactgatccgtatatattttctgttttttatctaaatccttctccccttttcctgccgtcataagaacggtctgcatcggatactctgcaaactgtgcaagaatccgttctgtctcttcatccctgacccctgagaatactcccagatgtccgaacagattctggaatctcgatacgatctgggttgcctgcgccgacccaagggaaagtcccgccattgcgcggtgcatccgtccttttttcacgcgaaaagtatgttccatatatggaataacatcctctgtcagttcccttccaaagtcacccgggaaaaagacagcctcctcatcatctctaaacgcgtaaccgctgcacataaccacgatcatacccttgcattttccttctgcaatgagattatccataataaaattcagtttgccgttccacagccagcttgtctcatcctctcccactccatgctggatatacataaccggatatttttgatctatattctctctgtaggaaggcggcagatagacataacatttctttatgtgatcattctgtgttgacacgtaagaatgaatctgcacatccccatgcggtacatccttcagataccagaaatcctgtccctcccgtggcatttcaaaaaagttatttgccccgaaacatccataagcaaacggtgcatgtgggttcgtcacctgtaccccatctacaaaccacctgtgataatgaaagcctggaagaatcccctttacatttttagaaaacagtccgtttgcctgcttctccagtgcaattttctccgttccaagcgttcctccaaaaccggaaacttctaccgtctctgcttttggtgcttccattgtaaaggtaacacttccatcctcctcaaccttggttccccagaaatcttcctgataacaaatacaatctttgccatctatctttttcatttctgcttttttataaattggatcaaaaaaaagcggatacattgtcagtgcctgattgtttttcattttcatctcctccttctgctctctttagctatttcgttttagcatattataaaaataatagcggcaatatatttccatattttttaccgccgctgttattttgtattgttatttataattttcttcctgttccagaccgctgctttcccgaatctgataaattggcagcagctccctccggattggaatatccatccggctctctcctgccagaattaaaatatctaatgcactctttgccatttcctgtgacggaatatccacagaagacaatgctggtctattataccggagtagtggagagttctcaaaaaatataatcctcagatctttcgggacacagattccgacatccctgcaatatgccattatccctgtagcaagcctgcagtcggctacaagccacgcggtcggaagttccatatctgaaagcatctgtttcgctgtctgatatccaatctcataggaactcttctcaatccttggattccattcttccttcgccacaacatcatgactcctgcacccaaacaggaaacctgcctccatcagtctctctgctcttcctgttttctcaaatcccaaaaaggcggcagatttcactccggaaaggttcatacatgccgcacattcttcacctgtccggtagctgtccatcagcacactgtgatagatctggctgtcacgtccgataaacacaatcggaatcgtgatctccctctcttccagcgccttctgctcttcctcgttaagtccacagatcatggctccactgaagcggttgcttgacagcatatccatatatgtcatgaagttccctggttcatatgcctggacaaccagttctatcttcagctctttcaaatcaattgtctgaaagatgccttccaggaaacgcccgagacgtgagtttagattgtcacgcctccagaacagtgccaaaacatatggtgcctcctcgttagctgcctgtctcaatcttctcgcataaatattgggctgataattaatctctttcgccgcatttaatactttcttctgcgtctcttttgatattcttacctggtctcctctgccattcagcacaacagacactgtgctcacggaaagtcccagtttatccgcaatattcttaatctgcatcttggacgcttgttttttacccatatcaatgcctttcatcctattttgaactatttttgccttataactgagcctaccatatctaagattcttttgtcaacccgacaaccggctgtttttccttcgttttagcaatggcatccggctgtcctctctttctgaaaagaccggatgccattgcttattcactgcttatctgtttgttttttattttgctgcttttcttgcatcgattactttctgatatttttccatatcaaatttcacaagatcatcccatccgataccggtaagagtctcttttaagttttcccataatgcatcgaattctgcctggtctgctgcaaagaccatcttccaggatgcatttgtaatttcctttccacactgacttctgatcagcgcaatatctgttgtatcactttcaagaacaacatttacatttgcaaccgtctttaataatccgttctcctcaaagtattctgtctgtgtatcagtgccatatttttctgtccagtcaacatatctctggtccttcggtttttcaagattagtgctccagtagctcatgctgtaaggctcattattattcggattaactgccatgttagatacaatgtactggttcaactgacattttccatcattgtagagaccgccgccccattcatccggaagattcttcttacctgctacataagctacagagtcatctgtctgtgcatagcgtcctgttccttcttcaatggtgtagttgacaccagcaataccatcccacatgtaactgattccttccggacttgccatccagtcaaataactgcataattttttcttttgttgcatcgtctacgccagaaccaatgccccatacgcggcctgagccataataagaatctgctacctgataaatattaaggtcttcaacaggaacattcacaaatccttttcctgctgctttgtcttcatcggaaagattgatacctgcaaggttcatttcccagttgtaccataataagtactttctgtatgcacgaagcttctgctcgtctgttgtggtccagtcctgaacagaggaatccggatcgatcagccctctctgatttgccttgaagaagaactcaagcatcttgtaatatgcaccgttctcatcaatcaatggcatcatactgttgtcatttccaattaatacagactgatttacttcctgcccataccattttgcggtctggcagatattttccataccgaatccatcccagtctttccagagggaaatcgcatatgctttgtcaccagcatcgttggtcggatgtgctttctgcatctgctctaaaacatccagaagatcatccaggttctttaattccgggcatccaagttctttgtagtagtcccatggaaggcatggtgctgagaacggagtcgactgtgaatatgtctctggtgaagtattcgtcatctcggtagggattccccaaatcttacttccatctccaacctgcgcattgaacgcctcaatctgtgtcttatactctgctaagtttggataattccagatatcatccgtaatatccataacaagtcctgcttctacgcagtccagataatctgcattgtccagaagaatgatatcacccagctttccggagctgcatcgcgtctgataaagtgctgccgcatcaccggatgtattcggtgcaaagatattcagttccagaccgaacttctctttcacaaggtcgccaaaccagcctgcctgcatgccctgatagtttgccgcaacatcatagacttcgatggttgtcacatcccctgatgcctgtgagcctccctcttctgttgcagctgtctggttcttgttgtcccctgatgaagcatttccatttgctccggaatctcctccacagcctgcaagaactgtacttgctgtcatggctgctgccaggcctaaactaattgtccttctccatttcataatacatatcctccttttgtttttctacaatagccccctattgtgtgttgaagtttatgaattttttctcaacccttcactgcgccgatcataattccttttacaaagaagcgctggaagaatgggtatactaatagaattggtgttacgaccagaatagttactgtcatacggatggaagtagccgtctgcgtcgttgcaagcatctgctggattgcttcactggaggttccggaagaaacaatcgttgcaagtgagcttgcctggttaatatactggtacagaataaactgtaacgtatataactttgtgtctgttacaagaagcagcgtatcctggaaagaattccactgtcctactgccgcaaaaattgcaaccgttgcaagaatcggtttaataatcggaagaataattgagaagaacaccttcaatgttcctgctccgtctacttctgctgcatcctgcagctccctcggaattgattccacataagtcttcgtcagaataatataaaaaggcgataccagcgtcggcaaaatatatccgaggaaattattcgtcagatgcagattattcattgtaatataccatggaataattcctgcattaaaatacatagtcaatactacgaaccggtaccagagtttccgtttccacatggtttctcttgtgaacatataaccgaggaagccggctaacaataccgtacatgccgttccgatcagcgttcttgcaatggaaatctgtgctgcctgcagcagtcccggaatcttggttgcatccagataatttctgaaatggatctgctgcggccagaagataatctttcctttttcactcagatcgttagcactgatcgtattgataaaaatatagtaaaatggataaatacagatcagggaaaacaatgcaaacacaatataagtaatcacgctgatcagtttatcaaccggaccggcattttcttttatttttccattctgtttcatgttcatatcctcacttccatttaaataaatccatcaccacgcagtactttagatagcgtattggcaccacataacaaaatgacgctgatcagactcttaagcatactgagtgcagtagatacagaataacttccacttcccattgccagattgtatacatacagatcaagtacctggatagtatccatattaaatgcattctggaatacatagtactgttccattccattggaaaggaaatttgcgatattaagcattaataatacaaagtatgttggcagtaagctcggaatcgtaatattccagatcagttgcattcttgttgccccgtccacttttgctgcctcatataattctgcatcaatccctgagattgctgcgatatacatgattgctgaccatccaaggctcttccaggtactccacagccacattttcagccatatatgattggaagactgcaagaaagcgatcggtttttcaagtactcccatctgtatcagtaagctgtttgccatacctgtactgttgaacatacagtagcagatagaaaataccagtacccagctgatgaagtttggaagtgtcgtcacggtctggacaaatttccggaatggcatacacttaatctcattcagaaatacggcaaaaatcatcggcagccaggaaaataaaatggtcaatccactcattgcaaaggtgtttctcaaaaccatcagcgtctgcttaatcctcaccggattgtctaccagataccggaaccacttcaatcctacaaagtcatccatgctaagtgcttttggcggtttgtaatcaaaaaacgcgtatgcccatccatacagtggataataagcaaatatcgcaaccagaataatgaaaggcagaatatagaggaattcccgataccctctcatctttttcttatttgtaaaaactttcattcagctacccctcctattttctcctcagtccaatctgttttctctccgtacatttcttatgttgctattatatgctatttcgttttagctgtcaatagcttattcattagaaactattttcaaactgccatccggaagtcttctaaactgttttacataattccatccaagctcaggatccttatctgctacctcatgtcctttgtcatgcatcatcgccagattatacagattcactggatgctcttcatccgagtaaaacctctgaacgtcatagtaatgttccggatgtctggcagaaggccggattctctgctgaatctgccccggcacaccgcatccactcggatcaggtttggaaagatccggtgtctcttcgatccgaatatgattatacgccttccagaaatcatactgatgctgttgggagcaatgataataaatcggataagaaatttcccgggaaccataggtataccataccggcatccggtaatcgtattctttctttttctccatcgcaagaccaaacagatacttatcctgttctgtaagttcactggcaccatttctgattcccggccaatttgagtcaatatgacagatagctgcgatcagttccgggtggagcattgccactgcctgcgcctgtcctgctccattgctgaagcctgacaggtagactctttccggatcaactggatagtgttctttcatatattggatcaatgcaactgtatacccgatatcatctgctccatccggtgctaaaaagctgttccactgtgttctgtctgttccccacggatacacagtaataaagccttccttctcccccagttcatgaaaacggctcatctgtgcggcttcctccgggttatccgatcctccatggaaaaagagcataagtggtacccttcctgacgttccatctttcacaccggaaggtacatgcacaaaccaggtatgctttaccttcaccttttcctctaacctgtcatcatccagataaagttcaaacccggcttttttcatgtccggttttggttccacatctccatacacagaggtattggtgcgcctggtcacggaaaatagttcttcccatacccggttcaccagttctttggaaagctgcatattctctgaattcatgacacactgagatggatttcttttatttcttgtcactgtaatctgatctgccgtctctttccattctgtttcattaacaacattgaaataattctgtgttttcctgtcactgtccaccagaaaagccggtactgcagcattcaccgcctgatatctggcttcctcacatagccttccacccactgcaaaaattgctgctatattctctgccacacaggctgcaagcgtgcataccatatgcgctccgcttccggtaccgactagatacctggtgtcattcatcggatgccagacactcaacatagcttcataagttggaatcccgttcggccgtgttgcaagaggcttatcatcttcctttgtcattgcatcctgaaaatcatgaaaagctgtcagatcatctgtctctccggaaaaatcataattccagcgcccgttttccggattcgggaatgaaagaatgatttcctgttcctccgcgagtttttgcatgccaagctcatctaaaaaataccgtacggatgcttcgtcttctccatcacgtaatattgtaatgctgcagcgtttgaatgctgtccttctttcctgttccggaaaatacagatacatacttcttccgatcttttccagcttcttatatactaaccccatcttttacctcctctgtctgtgcaggttcgctaaactattttccgtttgtaactgctaaaacgtcgtagcttaactatagtttcttttttctattctgtcaatctattttttttgaatattcatctgtttatttcatcttttgcgacttttttcctgtttttcttctttatttccatttctctttgcgtaagtttttttgccattagagctatttcgttttagctttttattgacatactgtatccgcaatgttaagattgttttatcttaaacagaattttagtaataaagaggtgatcatctatggctcagggtatgaaaaacacagtcctggaccatctgcccgccggaacagatgctgaccttgcaaaagggaaaattcctcatacgcttccagacggcgtaaccaaccgggctgtttatcaggatattttgcaaattgccttaccagcgagtgtggagctgattctgtcttccttcacatctatggccgatctgattatggtaggaaatcttggtacatgggcaatcacggcagtaggcctcacgacacagccaaagtttatccttatgacaatggtcatggcgatgaatgtcggttccaccgcacttgttgcccagtcaagaggttctggcaaccgggaagctgcacagaagtatgccagacaggcaatgttgctcaaccttactttaagcatcctgctttctgtcgtcggttttgtgactgccagaccgctcgttcttttcatgggtgcaaaggatgggcacattttaagtgccggaactgcttacttgcagattcagatggcaggattcgtattcttttccctgacctcgaccatcacagcgcttcttcgcggaattggcgattccaaaacagccatgtactataacacagtcgccaatctggtaaacctgattctgaactacttactgattaacggacatttaggctttccacgccttgaggttgcgggcgcttctcttgccaccacaatcagccagattgtatcctgtatccttgcagtgatcgccatatcaaagaaaagctgttatattcatatgaatctgcatgatgacttcagaccaagcagaaaagagctcgcagaaatcgcagccatcggtcttccggctgccctggagcaatttatgatgcgaattggttctatgatcttttccaaagcggttgcttcccttggaacagttgaattcgctgcacatcaggtctgtatgaatattcaatcccttactatgatgaacggacaagtattctccatttcatcgacctcgctaaccggacaaagccttggaaaaaaaagacctgacatggcacaggcgtataccacacgctgcaagcggtgcggtatggcaattgccattacactcggtatactctttgtaatattcggaaggccgctttctggtctgtacacgaacgacgcaacctgtattacactatgtatccagattctctggattgttgcttttatccagccattccaatcttcacagtttatcgtggcaggtgcactccgtggtgccggtgatacaaagtttgttgcaaagctgacatttttcactgtcatgctgctccgtccgggacttgctcttctggcaatcaacgtattttcccttggacttcccggtgcctggtttgctatcctgaccgatcagatcatccgttctgccctgattgcatggcgctatcagtctggcaggtggaaggaatccgtgctgcgtacaaaagctgctgcctgacaccggtcagaaatcccgttgtgtatgcaaagcaccttagaaatttcaaacatttttttattataaattaacacatttatgaatggaggtatc

SEQ ID NO: 5177 - DNA, 3075 bp, Unknown
  gut microbiota DNA sequence
aaacgcggtcttccaggctgcggactgaaagtcgtccagtacggcaacaccctttatgagggctatttcggtgtcactgacatcgacaccaaaacacctgtcacgaaagacacactgttccgtcaggcatctatgtccaaaattccgctctacacagttatgatgatgctctatgaacgtggcaagtttctcctcacagacccaattggagattatcttccggaatggaagacaagtacccgctacgacaggcatccgaacggctatgtcgatatcgttccaaccagccgtccaatcaatatccgtgatgtcatgtccatgaaatgcggtcttccctattgtaattctgctgctccaacccacgatcttgtcatgactggcatgcaggagtgtatgcagccactctgggaaaaaggatcttacactttgaaagaacatttatctgccatgtccaaagcacctcttgcctgtgatccgggcacgcactggatttacggattttccagtgagctcgccgccggaatcattgaggctgtctgcgacaaacctgtcaacgatgttttcaaagagatgctcttcgatcctcttggcatgaaagacactgccgcgatttttccagacgaacagacgaagaaccgtcttgtcacactctatgccaaagatcctgatggaaatcttgttccaggacctgacttttttgataaaaagcatctccctggaaaagaaaatgaagccggatgggcaagactttattcttccgtggaagattattccagacttttacagatgcttgcctgcggtggtgtctatgacgggacaaggctcatgagcagtacgacaattgatctgatgcgcacaaatggtctcaccagagagcagcttctcgactttcctgacaaaggatatggttacggacttggtttccggacagtcattgaccctgctgccggagatttgaacgggtccatcggtgctttcggatggaccggcggcttcggaagctggtgcgaagcagatcctgcggaagggctctctattgtctatatgcacaatctgatcccgaatgatgagcagtactatcatccgagagtacggaccgcttcctacggattactttaatcccgtattgttccccgccttccgcacaagatgcggtggcatccagtttttataaacgcgcatatgcgcagaaatgaggtttttacatgtcagatttcaaaaacttagatcgccttttacagaaatatgtagatgatggactcccgaactgcagttgtatgatcgccaaaaaaggagaaatcctatatgaaaattactttggctgggcagataaggaaaataccgttcctcttactgctgatcatgtattccgccaggcttccctgaccaaaattgcaatgtatacaaccggtatgatgctttatgaacaaggtcgtttcctaatgtcagatccgctctatgaatattttccagagttccgacattctaccaaaatcatccagctgccgaacggtacgctcgaagaagttcctgttgagcatccgatcacagtaaaacaaatttttaatatgacctgcggtcttccttacgaaatgatcataggaggcatcccggttcatcacccaactgcaaaagcaatggcggatgaaatgaaagctttgcgtgccaacggttacttcactctgcgcgaccagattaaagctgctgcaagagttccccttgctttcgaacctggaacccgctttctttatggttttgccagcgagctgaccgccggtctcttagaagtactctgtgacaagccagcagaacaggtcatcaaagaaatgctgtttgagcctctggatatggacagttccgcaaatttcctgttcggagaccttgaatcacggcttgtaaaaaattattacctgaaacctggcaaaacccttgccgatcctgactgtctgaccgttccggataaagtacacgaagcttcctttgtcgggcctcttggaacggttcccggctttgcccgcgtcattaccaactgtcgtgactacacaaagttgatgcagatgctggcaaacggtggcatacacaatggagaacatattctcggaagaaaaaccatagatctgatccgtacgaataccctgactccaactatgataaaggaagatttctccaatgactatcttgccggatacggttacggatatggtatgcgtaccctgatgaaccgctacgaaggtcagcacaatggcatgctcggtcagtttggctggaccggtggctccggaacctgggcagaatgtgatccggaaaccggactttccattgtatatatgcacaatctgcagccaaacctcgaacaatatcaccatttaagaatgcgtgaagttgcttacggatgcctgtaaactttaccaataattcttttttatagttccctccttacagaaaaagagcttccacgcagttctactacagaacatgcgtggaagctctttttctatttatcttctgtacttattgctgaaattcaaaatacttcttcgtattattatggtaaatatattttttctgtcaattccactatccttgattgctcttccaactgcacgctcatttacataagcatttgctgtatcaattagggaatatcccatttttaatgcctctaatgtacttgtgtaggcatcctctggtgataacataaaagttcctagtccaagcattggacattcattgataacctaaatctcatcctacactttagttatctccattgtgtgcttgaatagatttagttctcggtgcccattttgtcttttcggtgctcgcaagccccataaaataaaaaatgcaacaatgaatttttacgatcattgctgcaaaaaaatcgatgttccctgcgggaatcgaaccctcaactagtgcttaggagctcgaatccaccttggaaacatatataattctaagttaatccaagtcaaggaaagccttgatttttctaactattctgtaattccatgtcaaaataagaaaacttaaaatcgtctgagaaaaatggttttcgctgtcaaaccgctg

SEQ ID NO: 5178 - DNA, 37436 bp, Unknown
  gut microbiota DNA sequence
atattctggatgcaattcaaaaatattcattacagacggaatgcttatgtgttgaaatgacagaaagcggatttatggatatgacaccttcgttctgtaaattccgtaaaactctggacaagaacgggattccctttgtgatcgatgattttggaacaggatattcgaatcttcattgtatccgtgatatgaatccaagttacgtgaaaatggatagggattttactgccaaggcgatgaacaatgacagggattatgaattatataaaaatatcatccccatggtacatagtattgacgtcaggatatgcgcagaaggcatcgaggaaaaagaatggcttctgaaaatgaaagaaatgaaggttgattatctgcagggatattattttggaagaccatgtggaaagaaacagtttctgcagcaatatgccagtggcatcaacgttaaataaagagagtaaggcagactcagctatgtggggctgccttattttatggtcttatcagaaggatggatccataacggcttctttcagtttttccaggtcattggcatcagggtgagacaatgcacagtcaaaattctggatcaatacatcaagatttgccggatgatcaggagcttccttcattttcaagtagcgttcccggacagattgcggcattctgccctgacacatatactctccgacgataacattgcttgcgtcaatgaactgcttaacctgactcaggattttccgaaaatagatatcactgccaccaaagcctgcagttccaaacagaaaaatctgtttattctttaactgcgataatagctgtaatgtcctggtatctgcattacccttgtctgtccaaaatccgatatagagcagttcggaagaagggatcactgtgtcggacacaccgaaatactcacattcatcctgaggtaatgcctcgtggattgcatcagccagcaccttggtattacctgttaagctgctataaacgatggaatattttttattcttcatatcatgttgtctcctttcataggatcatgaaattatcatatcgcattcttattttagttcggaaagcatgatttgtcgaatgaattttccataaacattttacagagcgaaatggatagttgcttttcctgctacttgtgataaattagagtaaataatggtcaaaaaaccatcgacatccgacctttggcacgttagaattatttgaaaaagtaagctaaaatacaggaaaaagaacaggtagaggggaaatagtataaaaaataagatttttcacacgcaagaatggaggttattatggaatattcagcaatttatcatgatatggacaaaagattctgttacgcaattgataaggatctgtttgtgatacgtgtgcaggttaaaaaagatgatatgaaggagatcatccttcactgtgaagataagtatataccaatggagtgcaaggatacgcggaagactattctgatgaagaagattgccacttcacagtttcatgattattatgaagcacagcttcagatgcatctgatatgtctcagatattattttgaatttacggacacgcagggtgaaaaaatatattatggcaattatgagttttctaaggaatgcatcacaaacagggacagaatgtttgattgtccgcagaatcttcgggaagaagaaatgtttgaggtgccggactgggcagcaaataaggtcgtgtatcagatttttccggcccgttttgcagcatcgcagcaggtagataaggaacaatggtataaagcaccaatttcgtctatggatgatctgcatggtgatctcagaggaataattgaacatctggatcacgttcagaatctgggaatcgatgttttgtatatgacacctatctttaaatcaaattcaagtcataagtacgataccattgattattatcagatcgatccatcatttggaacgacagaagatctcagggaactggtacaggaagctcataagcgtggaatgaaaatcgtcatggatgcagtgttcaaccatacaggaagagaattttttgcatttgaagatatcatggaaaaaggagaaaaatcgaagtatctggactggtattatattgagaaatttccacttaaaagtgaaagaggagagattccaaactataaatgcttcggatactatggcggaatgcctaagctaaatctgaaaaatcctgaagttgagaaattcattacagatgttgcgtgctattggattaaggaatgtaatattgacggatggcgaatggatgtaggagacgagatcagtcattatttctggaagaattttagaagagcggtcaaggctgtaaaaaaggatatgctgatcattggagaaatctggcattatgcaggagattttcttgagggagatgaatgggatacggtcatgaactatccgttttatctgaatctgatcgatctgctggcagatgaaaagatacaggtcagtcagtttatacagaatcttggatatttgaagggacgtttaaataaaaaatgttatcctcttatgtggaatctgattgacagccatgacacagcaagatttttacatctgtgtaatggaaataagaaaaaacagcatttggcagcggcttttcagctgttattgccgggaatgccaatgatttattatggggatgagtttgctatgccgggagcaaacgatccggattgcaggcgcggtatgtactgggatgaagaatatcaggacaaagagatgtatgaatggtataaacagctgctttggatccggaaaaaacatgcgtgtatttcagaaggcgaactgatcggggcaattacaaaggatgaggaagaaacaatagtcctgattcgaaaaaatgtcgaagagacaattgccttgatttttaattgcagcagtaatgcaaagaactttagcgagtatgagggaaaatataatttgcttagagatgagccgtttaatggaaaagttgaggggcttgatgctgcggtaatcgtgctttaagaatatataagaatgactcctgtttgcatatattatctgcagacagtataatcgtatggtcagtcaattgttatatttaaattctaagaactaaggaagaactactgtatgttaaataaaaaagattttttaaaatatgcatcgacattagcatttccgattatgctccaaaatctgatcggaacattggtaaacattgcagacacggtaatgcttggatacgtgagccagactgccatgtcggcgtcatcgcttgcgaaccagtatacgtttattcttttctgcttatattatggaatggcaacaggtacttcggttttatgtgcccagtactggggaaaaggtgataaaaagacagttgagacgattcttggcctcgcagaacgtatatccctgattatttctcttttattttttgttatctcttttactatgccaacggcaattatgaagatttttacaaacagtcctgacacgatcgctgccggaagtgagtatctgaaggtgatttcattttcatttttattcatgggattctcacagatttttatgagctctctccgaagcatcgggaaaatcatgctgccgtcggttacgtatattgtttcgctttgtgtcaatgtactttgtaatgcatcctttatttttggattgtttggtcttccaaagctcggtgttacaggtgttgcacttggcactgtgattgccagaatctcagaagtgttgatttgtctgatttactcattacgcagttcagacgtcagattcagaataaaatatttctttacaaaatcagatattctgtttcaggactttataaaaattgccactccggccgtgataaatgacgttgtctggagctttgccaattcagcatttgcagcaattcttggtcatattagtgatgatatggttgcagcaaatgccgttgctgttatggtggtaaatatcggcgctatcgcctgccgtggttttgccaacgctactacgatcattgtcagtcaggaacttgggaaagaccgcatcgatacagcaagagagtacggaaaacgaatgcttagaataacatttattgtcagcctgatcggatgtgtcgttattctggcgatccgtcctatgatactggatttctaccgggataaattaacagagacggctatttattatcttggcatttttatcattatgacaacctggcgttttgtgggcgaaggtattaatacctgtcttatatgcggctgcttcaggggtggcggtgataccagatttggaatgatcgtagatactatatttatgtggcttgttgcagtcccacttacttttcttgctgcatatgtttttaaactgccgcctgtctgggtatactttgtcatgacactggacgagttcgaaaaaatgcctgtggtattcattcactatttcagaaataaatggcttacgaacattaccagagattttgagtgattgcagttaccgtaaagttttctaaacaagttgataaaaaaaagactgtcagattaaagtttcggtaaataaggggtaacatcatactcctgaatgaattttacaaatttagttaactgatccggtacaaaaacaccctttttccagatgataccaaatttactggtgatttccggggataccgggatcacaacaaaatcacggggattggtagcgagagaggaatacaaaaaagcaccacatttaccaccccggacaaaattaaggacagtaacgagctggctgcagtacatgtggacatttggtgtgatcccggcactgcgcagacgggtgatgactgtctgggtttgaacagagtccgtattgaataagataatgggctcatcttttaacatatccattgtaatttctttttcatcggcataccggtgcgtcttggaaacacagtagacatatctgtcttccatcatgacataactgttatatttatccagattataaaaatccatatttgccatggcgatatctaactgttcattgtcgactaaagtacgggcgcggagggagccatattctaaaagctgaatgggtatattatactgttcctgaaactggtcggtcacccgcggaaaaaataccgtgctgatcataggaggaataccgatccgcagcgggtgccgctttttttcaatatttgaaaagtcggtgtacagttcctgcgtctgttttagaataaattctgctttctgataaaaagccgcaccgtctttggtgagggaaattctgttctttccatggttaaaaagtttcagatgaaattctttttccagatcccggatcgaagtggagatcgtaggctgggaaacatagagcgcgtcagccgcgcgggtaatactatggtagcggcataccatacaaaagtattctaattgtgtcagtgtcatagaatcctccgtcattgtacagaaaaattatactatagtttcagtataggaaaaaactatgctgacgtcaagtatatgaaatgtacattatactgaaaatgcgatatgctgtgtttacaaaaggaaaacgacaaggccatgtcactttttaacatgataaaaaagagaaaaaaggaggttttctatgagcccgacagtaattacattaatatttctggcatttgccattatcatgtttgttacagagaagattccactcggtctgacatccatgattgtctgcattggtcttgtgattaccggtgtgttgagcgtaagtgatgctttcaatggatttatcaacagtaacgtgattctgtttgttgccatgttcattgtaggcggggcattgtttgaaaccggtatggcaaatgagattggaagtctggtaacaaaatttgcaaaaacggaacgcagtctgattatcgcaatcatggtgattgtggcagttatgagcggatttctttccaacaccggtacggcagcagttcttattccggttgtaattggaattgcagcgaagtcagggtataagcggtcaagacttttaatgccgttagtatttgcagcagcaatgggaggaaatctttcactgattggtgcacccggcaatatgattgcacaatctgcacttgaaccgttgggattgaaatttggatttttcgagtatgcgattgtcggtttgccgattctgatcgttggtattctattttatgctacgatcggatttaaaattttaccgcatcatgacacgacggatgcagatgattctatttttgatgagtcacaggattttagcaatgttccaaagtggaaaaaagtattatcgctggtgattctgattgccaccctgatagggatgatttttgaagaacagattggtgtaaaactttgtatcacaggctgcgtaggagcaattttattaatcctcaccggtgtcatttctgaaaagaatgctttaaaatccattgatttaaaaactattttcctgtttggaggtacgctttctctggcaaaggcactcgaggttactggagcaggagaactgattgcagataaggtggttggagcattgggtgaaaatccttctccggtactattcacttttgtggtgtttattctgtgctgtatcatgacaaactttatgtcaaatacagctactaccgccctgatggcaccgatttgtatatccattgcccagggaatgggtgcagacccaagagcagtcctgatggcatgtgtcataggaggttcctgtgcctacgctactccaatcggaatgcctgccaatacgatggtagtcggagccggcaactataaatttatggattatgtaaaagccggaatgccgttgatcgtcattgcaaccgtggtcagcatgattattttaccaatagcatttccattttatccgtaggataaaatttttatcacgtaggataaaatttcacttttaaattatattattgaaaaatctggaggaaaaagatatgtcaaatgaagtacaagtaaagaaactgactgatattatggcgcagttcgtaggatttacagcaaagaagctgccggatgatgttatcgcaaaattgcaggaactgagagacaaagagaattctcctatgacgaatgtcatctacgataccatgttccgcaaccaggaactggcattgaaattaaaccgtccttcctgtcaggataccggtgtattacagttctgggtaaaatgtggaacaaaattcccactgattgataatctggaagcattactgaaggatgcagtgatgcaggctacagttgcaacaccgcttcgtcacaattccgtagaaacttttgatgagtacaatacaggtaaaaatgtaggaaaaggaacccctactgtatggtgggacattgttccaaattccgataaatgtgaaatctatacttacatggcaggtggaggctgtacgcttcctggcaatgccacggttttaatgccgggcgaaggctatgagggagtgaccaagtttgtattagatcgtatgacaacttatggattgaatgcatgtcctccacttttggttggtgtcggcgttggtacttccgtagaaacagcagcattaaattcgaaaaaggcactgatgcgtccggtaggttctcacaatgacaatgctaacgctgctaagatggagaaattgttggaagacggtattaatgccattggtcttggaccgcagggtataggtggcaattattctgtcatgggagttaacattgagaataccgcacgccatccatctgcgattggtgtggcagtaaatgtaggctgctggagccacagaagaggacatattgtatttgataaggacttaaactttacggtagatacccataccggttttgaatataaggaagagaactaattcagaagggagagaataattatggcagtagaaataaaagatggtaagaaaattctggtaacacctgtatcggcagaggatttaaaggatattcatattggagatattgtatacctgacaggagatattacaacctgtcgtgatgtggcacaccgtcgtgttgtagaagagggaagagagattcctgtggatgtcagagatgctgcaatcctgcatgccggcccgattatccgccccttgggagatgacaaatacgagatggtatccgtaggccctacgacatctatgagaatggaaaagtttgagtatgaatttgtagagaccacaggcgtccgtgtcattgtaggcaagggcggcatgaaggaaaataccgagagagcctgcaaggactttggtgcaatccattgtgtatttcctgcaggaaatgcagtcgtggcagcagtagaagtggaagaaatcgtggaggcacagtggaaagatctgggaatgcctgagactttgtggcattgccatgtaaaagaatttggaccactgatcgtatccattgattcttatggaagaaactactttgaagagaagaaagtggaatataataaaaagaaagatgagcaggtcgaaatcatcagcaaacaggtcgggttcatcaaataaaatccgaacatagtaaatatgtgtagaaaaataaaagaccttctgtggaaaaagctggattcatcaaaggatgaaacaggcttctgcagaaggtctttttaatacaataagcaatgctgatcatatatcacgggctggaccaatgcgtattgtgaagaaaaaataattgacatagcagaagtattaccctataatcgttctaaaaagaacaataaggaggcgcagatgtatttctgggacaagcataagacgattacaaactattatgaattactttctgacgaggtgtgcgatcaatatgagttaacacagatggaatacgatataattatgtttttacataataatccacatcataatactgcagcggaaatagtaaggatcagaaaatcaacgaaatcacatgtttcttcttcattgaaaaaattggaaaacaaaggtcttataaaaagaaaacaaagtaaagataataaaaaacatattgaaattgtccttctggatgatgcggcacttatcgtggacgcaggattaaacgcacaaaaacagtttgcacagaatgttttaagagggctgacagaagaagaaaagcatgtgtgtatgaatgtatttgacaaaatttgtaacaatgcggaagaactattaagaggagagagcaagtgaaaaagagtaattataaaccacagattccggatttgatggaagcagtctttgatgcagtgtatctgacttttgatctggcagcagcagtcttattttttttattctcaaaaggaaatatcctgtatgtactatatggaatactgacattgacactttgtggaggggatgcttttcatctggtgccaagaattataagggctgtacgtggaaccaatgataaaataaagagacagcttggaattggattgcaggtatcgtctatcacaatgacgatgttttatattcttttaatgtatatatggaaatatacattcccggaattaaaaataccagtagtcattgagggtgttatatggatatcagcggttatcagaattgtgatatgtatgtttccgcagaataactggtgtacagatgaaggaaatatgaaattatctgttataagaaatgcggtctttgctgttaccggtataggtgtaatgatcttatatctgatttccggaaatacatatggatatcatatgacgaggatggctgcagccatcattatttcttttggatgttatcttccggtaacactgttcagtaaaacaaaaccgcaggtcggattattaatgataccaaagacctgcgcatatatgtggatcattgtaatggggcttcagcttatgttttaagagcagtaatatctgcagaaaggcaggaaattatagtgaatgtagaaagatttgtaaaactaatgacaggacattttgataacaaagaacaatttacagaaatgaaagaagcggggaaaatatttccatatgcacagcatgtgaatactgtctgtaacgataaaataaaaaatctgaaaagtttacaccagctatatatcaggaaaaggatggtgtctgggaagggggcagtgtgagccaatttaccccggttatggtattcaggctgtgggagaagttttcagacacttgtctggaggtatccgaaagtatggaagtccatggaaagagaacatttggatatgatgtgccgattagatataaaagggtagcaagtgagggataaagcaggaaagttcattggtatttgccagagcagagtctctgggaaaaaggagaaatatgataatgtcaaaagatgaatatttaatcacagatgagccccttaaagcactgacaatatttgcaatgcctatgattctcggcagtttttttcagcaagtgtataatatggctgattccatcattgttggtcagtttgtcggttcctctgcacttgcagctgtcggtgcctgtgctgcactgacaaatgtatttatttgtgtggcattaggtgccggtgtcggtgcaggtgtgctcgtaagccgctattttggtgccggagattatggtaaaatgaaaacaattgtgtcaacatcgttggtcagttttctgattttaagcctgtttctgggtggctttggtttttgtttttcacattcaatgatgaatttattacagacaccaactgatatactggaggaagcagtacagtatctccgcatttattttgcaggatttccatttctgtttatgtataatattctttcaacgatgtttaactcaattggagaatcaaaaataccattgggtcttttgatattttcttctattttaaatattcttatggatctttggatggtggcaggacttggtctcggtgtgttcggggcagcccttgcaacccttattgcacaggggatttctgcggtattttcatttctgattttcttttgccggatgcgtcaatataagagtcaatttcagtggtttgatggtcaggagttacatttgatgctcaaaattgctgtaccgtcgattctccagcagtccacagtgtcaattggtatgatgatcgtacaggcagttgtaaatccatttggtacacaggcactcgcaggttatgcggcaacaatgagagtagagaatgttttttcgttgatatttgtgtccatcggcaatgcggtttctccgtatgtctcacagaatcttggtgcaaagaaaatcaaccgcatcaaaaaaggatatcacgctgcgctggtattagacctgtgtttcgcaattcttgcatttgtagttattgaaaccatgtacacacagatttcttcattattcctgggtaaagatggaactgacttagcatatcaggtgtccggggattatatgagatggcttggctgttttttcatcttcatgggtattaagatggcaacagatggagttctgcgtggacttgggattatgcgcccatttctcattgcaaatatagttaaccttgcaatccgcctgtctgttgccatgatttttgcaccatgttttggcattgcatttgtctggcttgctgtaccggctggctggtttgcaaattttctgatttcttatatggcacttaggaaatcatggccggtttcaacagtctgtaacagtgttgcgaacggatagttactgttcacaggcaggcattttctgaactgaaaatgccgtatgatacaatggtggcagcagattttgccgatttggaatgcgaagcatcggcaaaatccgttactggaacgaggtacgagtgaacagtaacaacggataagtgatgggatgtaaatattttataatggatgttttcaggcttgttttaatgtgttaaaatatagactataaatccatgcatgatagtgcaaaaagcgggaggttctgttatggcaaaagacgattcattaaagaaacaaaagaagatagaggtcaatcgtattatgatttttatatcatcgatattgataccatttttgtggattgatctgtatttagtttcgaagaatacatcaaaactgatggttgtgggtattattgcagcgcttattttagtatggacaggtttgcttgtcacatatatccataggatgaaaaatgaggaaaaagcccattcggatgaacaggtagaagaactgctgcgtacaggaaaagccaattatctgatgcagaaaaagttagcggaaaagatagataatatcggagaaaaagatgcagttccagcggatgagatcattacggcacagaaggcaattgcaaagctgatgcttgcacgaaacaaagaaaatacagatgctcttatgcattcgaatgagcaggtgattgaaaaaacgttggaagtagaagaaaagctttctgaaaacagtcagcagatcatggacatgcagaaaaaccagatggatgaaaaattacaggaattgatgcaaagtcagaaattagttcttgataatttaaatgctgtcaaagaatcactgcagagtgacatgcaggatgttttgtcaaatatgattcatgacacattggagaaagaacttgcatctgccatagagcagatacatacttatgtgaaagaggcggcaagtcaggctgttgattccgtaaaggagaatcttgctgcggaagtgccggttatggcagctgtttccccggcaatggatgaagaattaccggatccaggaatgccggcagaaagtgaagaattaccggatcatggaatgccgacagaagatgaagagttgccggattcaggaatgccgacagaagatgaagagctgccggatcttggagtgccgacagaagatgaagagttgccggatctgggaatgccggcaatggatgaagatctgtctaatatggaactgccaacattgggagaagaattatcagaaacagaactcccggatttaactgacggcggagatctggatgaggaaccgtcaatcggcgagatgccgttaatggaagaggaagagccggaagcagccgatacatccctgatagatgaggaaccgtcaattggagagatgccgttaatggaagaggaagaacctgcggcggttgatacatccttaatggaggaagaaccgtcaatcggcgagatgccggtttttgatgatttgaacgatgctgcatcagccgtggaggaggtgcaggcagaaccggtagaagaagtggaagcggaagaagttccgattacggaggaagcaacagtagagccggatacggatgcagtaactttgacagaagagattccggtatccccggaggagtcggtaattgaggaagtaaagattccggaagaaactaccatcacagaagaaattccggtttccgcagatgaatcagtaatcgaagaggtgccggcacaggaagcagagccttccatggcagatatgagcaatccaaataagatcatgacaccggatgaaattgcagcgttgatcgcaaatttatagaaatgcatcataagtaaaacgcaattaaagatgtatttgaaagggcgtgtgaaaaaatgattcttactttttcacacgccctttttggcatttggtcatcaaagctctgcggtaatgcgcacgatctctttgatcacagctacagcagttttcattccctccacactgatgtgttcgaatggaccgtggaaaccgtaaccgcctgtgccaagattcgggcacggaagtcccataaagcttaaacgcgcaccgtcggtaccgccgcgtaccggacgtgagattggttcaagaccaacagaagaaatagctttctttgcgatatccacaacataagtatttttctcaatgatttccaacatatttgcgtaggaatcgtggatagtcagtgtaacagttccgacaccgtatttttggttcatggaatctgcgatttcctgcatttttttctgacgtgtttcaaacatcactttatcgtgatcacgaatgatgtaggaaagagttgctgcggcaacgtcgccggacatatcggtcagatgatagaaaccttcccttcccccggtgtgggcaggcgtttccgttggaggaagcagagactggatctcacacgcaacgagagcggcattgaccatgatatctttcgcctcaccagggtggacattcacgcctttgacagcgaaaactgcgcttgcggcattaaagttttcataggcaacctcgccctcataatcgccatctaccgtgtaggcaaaatctgctttaaagtagtcaagatcaaacagatccgcaccacgtccgacttcctcatccggtgtaaaaccgatccagatatcgccgtgtggaatgtccgaggagatgagctgttcagcagcagtcatgatctcagcaacgcctgccttatcgtctgcaccaagcagagttgtgccgtctgtcgtgatcagggttctgccctttaaagttttcaattccggaaaatcagatgtttttaaaacgtcaccggttccttttaaaataacatcctcaccgttataatccggaataatctgaggtttgacattttcaccggaaaaatcaggcgccgtatccatatgggaaataaagccgaccgcttttttgtcttcgtatccaggggtagccgggatcaggccgtagatgtaacagtggtctgtcagtgttactttctgtaaaccaagatcaagtaattctttttctaattcttttgccaggttaaattgtctgtctgtagaaggaatcatatcggaatcttcagttgaagtagtccaataggaaacgtattttaatagtctttcatcaacacgcatgataaatgagtgacctcctttaaatttgatagactaaaaaaagtgcatttttcagtccatgaataaaataccacagaatagaaaatccgccaatgaaaaaaatgaagattttctaaaaaaacacttgcaattttaaaaaatttaatatataatatcatttgtgttcacgagagataaacatatgcgccactagctcagctggcagagcacctgactcttaatcagggtgtccagggttcgaacccctggtggcgcattacgaagtaccgattttatagcagatggctatggggttggtgcttttttttgttcaatctttactgtgtgatctccaatataaaattacccataagaaacagagccgccataattttgaaaacaagatcaaaattacgacgactctgtttttttgtcaataaattgtatacaacatgcaattagcgggaggcaatgagtttacagatcggatttccttttgaggagaatttttcttcgtactctgtcataatatttccttcatttaaaacagaatcatgatggagatctcgggtggaggcatctaaatgccatccagcttccgggatttcctctaaggaaaaggtaaagagatcctgattgtcggttttaaactccagtctgccatccggttttaaaatggcatcgtaacgcgcaaaaaactgacgggaggtaagacggcgttttgcatgacggtctttcggccagggatctgaaaagttcagataaatgcgggaaacttcatctttggcaaaaacctctgtgacatcagcggcgtccatgcagatgaatcttaagtttggcataggagtttcttccattttctgaagcgcacgtaaaagtacactcgaatagcgttcgataccgaggtaattgatgtccgggtgcgccgcagccatatccatgataaaacggccttttcccattccaatttcaatatggagaggctgggtggaagaaaaaactgactgccagttccctttttttgactctggttccttgatgcagtattcactgtttaaaattgcttcatcagcacctgggatatttcttaatcgcatataagttataatcctgcctttcgttgtaaagtgtacagaaaatcgttgtccgaaaaaattattttcatacagaaaagtgtgcaaaaagcacacagaggtattttacaataaaacaatgaaaaaaagtagcattattttaagaaaaccttaaaagaaaatttgcgcataaaggttgcatgtatttttttcaaagtttatactgatactagcaaagatgtacttataaatcaggagattacttattaaaaaatgagatataaaatagatagaaatcataaaataacccgcttcttatgtttactgcttggaatgatactgctgaccggaagtatgtgtatcccggtctatgcggcagaatactggccggaaggtcctgaggtcgtatccccgaatgtgatcgtgatggaggcttctacagggacagtcctttatgattgtgatagtttagaggcgcattatccggcaagtatcacaaagatcatgacaacgctgatcgcactggaaaattcagacttgaatgatattgtgactttttcagatgccgcgatcgataatacggaaggatccggtattgcaagggactatggcgaacagatgacgatggaacagtgtctctatgcggttatgcttgcgtcggcaaatgagtgtgcatatgcggttgcagagcatgtagggggcaccattgaaaattttgttgcgatgatgaatgaaaaagccaaagaacttggctgtcagaatacacattttgccaatccacatggtctgcatgatgaaaaccattatacctgctgctatgatatggcattgatcgcaagggcagcatatcagaatgagacatttcggattattgtgggaaccgcacgttatacgatcccgccgacgaacaaacacgcagagcagacagatctgcagaatcataacgagatgctttatccattccagaccaacaagtatgtgtatgatggctgtaccggtggaaagacggggtataccaatgcggcaaacagtacgctggtaacttatgcagaacgtgatggaatgacactgatctgcgtagtcatgaatacgcagtcaccaaatcaatggcttgacagcagaaatctgtttgattactgttttgacaatttccagctttttaatattgcggaaaacgagacaaattatacgtcggcggaacaaaaaaacgcaggtacactcaatacaaatgaaccgtttgtggatattgacaaagatgcaggtatcgtacttccaaagacagcggagttttccgatgcgacgtcaaaaattgtctatgacgatgtgacgaatgatacggttggaacaattgagtatacttatgcggggcacgaggttggaaaggcagatattgtaaaaacaaacgtgcaggtaccggaatataaattcagcaatcagacagacgtaagcgaagaggcacagacggaagaaccagagcatgtttcaaaaatacagatcaggatgagtacgatcataaccgtggtggttgtagttcttgtcttacttgttcttgggattattataaagaaagttgcagataacttttatatcataaaacataattttgaagtgcgaaaagaacataaaagattatttaagcgtgaaaagaaacgcaataaaagacgtagaagacgcagataataaaaatttaaaagaaaatcgtctggaacataaaagttgcaggcgattttttttaattcataggaaattacgtcctatgaattaaaaagccctccgggcgggatgcgcatctcgcggagtagaagttagctgtaaacagcaccgctcgagcgcgaaagagtcgcaagcgactctttgttcttcctgacaatagaatgttcgtggagagtgcattctattgtacatgataatagaatatccgtggagagtgtgttctattgtacataggaaaattacatatgattgacagagaatatagttttgattatattaaatttagtaccacaagtgaaagttttgagcgggaaatatagacacaacactagtaactattgggaattggggttcgcattatgcgcagggaacgcagaaatggggttattatgtcagaatcatatgcagtcaatgaaaaaagagaactgatcttgcagaaagtcaaggagtttattgtggcacacggtgggatcgtaaagaaaaatcagttggaagaattgcacattgattaccggagaattctcgattttgtggaaaaaggggacctgatccggatcaaaagtggatattataccattcgcatcggggattattcggaggatgaactgattgtaaaattatttccggatgcggtgcttacgatggagtgtgcattgtatgcgtatggctatatcaaaagaaaaccatacggatatcagatcgcagtggataaaaatacgtcgaaatccagatttaagctggagtttccgcaggtcacaccgttttatgcggagccggagacgttacagtctggtgtggacaggatcgactttggaaatgcaaagatgcagatttttgataaagacagactgatctgtgagtgtctgaaatatgaagataagatggaacgggcagtttttcaggaaggtgttctttcttatataaaagatgaaaaaaagaatatagcaaatctgatgaaatacgccagagaacgccgtgtggtgaaaaaagtacaatcgatgataggggtatggctttaaatggaggataaaaaatataaaatagcggatttacaggaaaaaagtgaagaatggaagataccattttcaaatctgcttgccggatttgttttggaagaatttatgctcagattttccgcttctgaatttaaaaatcggtttttattacggaatggaaccgtgttgggattagaacagtaccgcaagaaaaatatactgaagctggactttttctgtgagccggatgagcgtattccggaaaagctgttgcagctgtacctgcaaaagaaagaacaaagtcccgtaagatggaaaggaacgatatcctcgcagcaggcggggacatgtctggaactgcaggggcagtttgaggagatgaaggttccggtgactgtcggtattcattttatgcatctgggaaaaatctggggactggtcgaaagacagattccatttttgatggatgagacagtgcagatcgaatggaaggaatttccggcggaactggtgctggcaaaacagatttttgtgattctgcgggatatggaactgatcccggatatggaaatatacagggaagtattttttatattgcgaaacgaaaccttaaatggaagacatgtatgtgagctgctcgaagatatgtgcaaaaccgaagaaatgatccctgatatggagcgcgcggagcagattttttcctaccgggattatccttatatgaaaaagcgctgggaaaagttttgcaggcacagtgcaatcgccgggacggaaactttaaaatgggaggaggagatggagtgttttcatcatttcctcggagatatgtgggaggctgtctgcagggacgaagtattttttggagactggatgccggaactggcgcgtttccttgggtaaagcggtcgcagacagatttcggtgttataactgaagataaattttcagtgcctgataataatcctgtctggtatctaagttgaaaaactgtcggtctaccggaatgtctgtgcaggcggcaagtgctttttccgtcacgcagacagttttgcatttttcgcgaagcgcatcaaaggtaaactgacggagaatgaggcttttcccgatcgttggaatacagttttttgaataggcggcggtagcaggatctaagtagcctgcttttccgcgaaccatgcagatatctgcatcgccgatcgcatctaaaagtgcaattccggtttccggttccataaaaggggtatccacggacatgaagaaagcggcatcctcattgatcatggacagaccggaaaaaacgccggacatcggtccggcattgccgtagacatccgcaatctccgtgaccgggagattcagatgcgcataatctccaatatattttacggagagatatatggttgaaaaatatggtttaaatttgtgtacaagatattctaagaggcagcagtcaccaaaaggtaaaagtgctttatccgttcccatgcggacactgtttccaccgcaaaggatcacaagcgcgtaattcataatagatctattactccattcttttccaaagatgttcttattttaaagtagtcaggctggtatgtaaagtgttaaaataaatgtgtaagcagaaaggcggtagcagatgaggtatttagatcaggcattagaggcatatgggaagagtgatgtctatccgtttcatatgccgggacataaaagaaatccgctgccttttccggaagtatacgagatagatattacggagatcgatgggtttgacaacctgcaccacgcagagggaattttaaaagaggcacagcagcgtgcggctgatctctacggttctgcacattgttattatcttgtcaatggcagcacctgcgggattcttgcatcaatctgtgcagcagtgaaaaaacggggcaggattctggtagccagaaatagccataaagcggtatatcatgccctgttcttatcggaactgactgcagaatatctttatccgacggtgacagaatgtgggattcagggacagatcacaccacggcaggtggaggatgcactaaaaaaagatccggagacctcggcagtcgtgatcacatcgccgacgtatgagggagttatctctgatattgaaggaatcgccaaagtcgcgcatgtgcacgggattccgctgatcgtggattcagcacatggagcacatcttggatttggaggggaatttccgcaaaatgcggtaaggctcggagcagacgccgtgatcgagagcctgcataagacacttccatcttttacacagacggcactgcttcatttaaattcagatctgatttcaaaatcacgcatagaaaaatatcttggaatttatgaaacaagttctccttcgtatattcttatggcgggaatggaagtatgtatccgtaccgtaaaggaacatggagcggaattatttgacaattacagacacgaattaaataaattttataaaaactgtgaagatttgaaaagactgcatgtgatgacagggaaggatttatccaaagaagaggcatttgcctgggatgattctaaaattgttatatttgtccgtgacagcagcaaaagcggtgagtggctgtatcaggaattacttttaaaatatcatcttcagcttgaaatggcatccggagattatgcgcttgcgatgacaagtattatggatcaggaagaaggatatcagagattgtcggctgcactgcatgagattgacagggaactgtgtggcgcaggtactgcaaaaaagcagcagaccatgaatgaaaaaaaggtaagatacggaaatgagacggatggttcgatggaaaacatgtatgaacaacaggttcacagaggttctttcataaaagaagtttaccgtcctaatccacagcagatgcagatctatgaagcggaggaaaaagaaaccgcagaggtatcttttgacgaagcagcaggcagggtttcagcagattttatctttctgtatccgccgggaatccctttgatcgttccaggggaggccatcaccgcagaatttattgaaagacttcgcacctgtatcagtttgaaattgaatttacaggggagcacggatctttttgcggagcggataaagattgtatatttttaaagactatattatactgataaggcaggacaaatgggaaaaatatattacatgatgggaaaaagctcatccggtaaagatactttgtacgggatgctgatgaaagatgagaaactcaggttaaagactgtggttccgtacacgacaagaccgatgcgtgccggggaagaaaacggtgtatcatattatttctgtgatgaagatacagtggaaaagcttgaagcagaggggaaaattatcgaattgcgtgcgtatcatacgatccacggcatctggaagtactttacggtggcagaccatcaggttgatttagaccatcagagttatcttctgatcggaacgttagagtcctatcttaagatacgggaatacttcggaacggagagcgttgttccgatatatatagaagtagaggatggtatgcgcttacagcgtgcgcttgagagagagcggaggcaggaaaatccgaaatatgaggaattatgccggcggtttcttgcggatgaaaaagatttttccgaggaaaaattaaaagaagcaggaatcacaaaaagattttgcaatgagtcgttagaagagacggagaatgcgatcgctgcgtatatcgaagagcaggaatagttacttttttacaggaagaaggtgtcagccttggatattaacaaattaaatcatgtaacagaggttacacaggtaccggataccaatcagaatgtacagggagatggttcctttaagtttacgcttgcgagtgcgatcacggatgcggatctgcaggcaaaagtggacatgcttctttctgacattacagcgcagggcaaccgtattgcgcagcatatggatatccgtgatatgaaaaaataccgcggtctgatccgcgaatttatgaatgaagtggtattccggtcccacaagttttccagggagaattttcttgaccggagaggacgccacagagtgtacggtctgatcaagctgatcgattcgaatctggatgaactggcgcaggagctggtaaaggatgagaaagaccacatcgcgattttaagtaagatcggagagataaggggattgatattagatatcctcacctgatcttttttggatgtggattggatatacggcgcacgcacatggcgggaaatctggtagcagaaaagaaaacatgaaaaatatgtgcagaaatgaggatttatatgccagcatttaaggacatcgttggacatgagcagatcatagaacatctgcagaatgcgattaccatggataaagtttcacatgcttatatattaaacggaccggacaaatccggaaaaatgatgatcgcagaagcatttgcacagacgctgcagtgtgaggcagtaaataaaaagttagaggaacttgcaggtgagacagaatctgaaagaatagaaaataaatttacagcggagccatgtatggagtgtcattcctgtaaacaggcggcgggcaaaaaccagccggatatcatctatgtcagccatgagaagccgaatacgatttcggtagacgatatccgtacacagttaaacaatgacattgtcattaagccatacagcagcaaacataagatttatattgtggatgaagcggaaaaaatgaaccagcaggcgcagaacgcactgctaaagacaatcgaggagccgcctgcatatgcggtgatcctgcttttgaccaccaatgcggagagttttcttccgacgatcttatcccgctgtgtgacgctgaatttaaaggcggtgccggatgagaagatcaaaaaatttctgatggcacattaccagattccggattaccaggcagatgtctgcgtggcatttgcacagggaaatgtcggaaaagcgatccagcttgcagcatcggatgattttaatgaattaaaggcatctgcgcttcagctcatcaagcgtctgcacgacattgacctctatgagatgacagaggcggtaaagcagatcagtgaatataagcttcagatcaacgattactttgatcttatgatgatctggtatcgtgatgtactttattataaagcaacaaaggatgtaaacggccttattttcaaggatgaggtctatgacataaaaagacaggcagagcagagttcttacaatggaatcgaagaaattttacaggcactgtcaaaagcacaggtgcgtttaaacgcaaatgtaaattttgatctggtgatcgagctgcttctgctgaccataaaggagaattaacatgataaaaatagtaggagtccgtttccggaatgccggtaaaatttattatttcggaccgggaaatctggatctgactgcaggaatgcacgtaattgtggaaactgcgcgtggtgtggagctgggaacagtcatgataccgacaagggaagtgaatgatgacagcgtgatccagccgttaaaaccggtcatccgtattgcaacggaggcagatgaaaagacagcattaaagaaccgtgaaaaagaaaaagaggcatttaagatctgcctggaaaagatagcaaaacataagcttgatatgaagctggtggaggcggagtacacgtttgacaataataagctgctcttttattttacggcggacggacgtatcgatttccgcgagctggtaaaagatcttgcagcggttttccgtaccagaatcgagctgcgccagatcggtgtccgtgatgagacaaagatcatgggtgggattggaatctgtggaagagaactttgctgtcattcctatctttccgagtttgtcccggtatccatcaagatggcaaaagagcagaatctgtccttaaatccgacaaagatttccggtgtctgtggacgcctgatgtgctgtctgaaaaatgaagaagaaacttatgaatatttaaacagccgtctgccaaatgtgggggattatgtgaccacggatgatggcttaaagggagaggtatcttccgtcagtgtactgcgccagatggtcaaagtactcgtggaagtggatgacgaaaaggaaatccgtgattactctgtggatcagctgaaattcaagtcaaaacgcagaagagatcatgtaaagctgactgcgcaggaattaaaggaactttccgcattagaagataagggaggaaaatccaaaattgacgatgccaaataatctggtttatgaacaggagagacttgatgaactgcatcgcaacggctattttatcattcaggatccgaaaaggttctgttttgggatggatgccgttttgctttccgggtttgcaaaggcaaaaaaaggggagcgcgtgctcgatcttggtaccggtacgggaattatcccgatcctgatggaagccaaaacagaagcagaagattttaaggcgcttgagatccaggaagaaagtgcggatatggcacgccggagcgtgtgctataaccatcttgaggataagatcgagatcgtgaccggagatatcaaggaggcatctgcgatatttggagcatcttcgtttgatgtgatcaccacaaatccgccgtatatgatcgggacacatggacaaaattcgccgtctgcggcaaaggcgatcgccagacatgaagtgctatgtacactggatgatattttgcgggaaaccgcgaaaatgcttgtgccgggaggcaggttttatatggtgcaccggccgttccgtctcgcagagatcatgagtaaaatggtcgagtacaagatcgagccgaagcgcatgcagcttgtctatccgttcgtggataaagaaccgaatatggtgctgatcgaggggctgcgcggtggaaaatcaagacttgccgtggaaaaaccgctgatcgtttataaagaacagggcgtgtatacagatgagatttatgatatttatgggtattaagtggattatttaaaaccatattgtgtataaagcagcagaaaaattattttgtgtggaaaatgacagatatgaaacataatcagtatgtatttgagtgattcagaaaggataaattaaaatatatgtttaatgatataaagataggaccggttacatttcatatgtatggtcttatgattgcgatcggttttgcagcggcacttatgatgtgtttaaagcgtggaaaaaaacgtggcttgaacgaggatattatctatggaatcttcttctgcgcaatcttcggtggaatgatcggctgcaggctgctctattatattgtagagatcccggagattttaaaagatccgtccatactctggaactttaaaaacggatacgttgtttacggcgggatcatcggcggtgcgctggccagcctgatctactgtcgtgtcaaaaaagaacgttttctgccgtactttgatcttgtgatgcctgctgtatcatttgcacagggattcgggcgtctcggctgtttctttgcaggctgctgctacggcagggagacggattcgtggtttagcatcacatttacccactccgactttgctccgaacggtgtaaaacttctgccgacacagctgatgtcatctgccggggatttcctgatctgcggactgttactgctctatgcgggaagaaaaccgaaagagggacaggtcgcagcaggatatatggtgctttacggaatcggaagatttattattgaatttttccggaacgactaccgcggaagcattggagtgctttccacatcacagatcatttcgatcggagttgtggcagcgggagttgtgttttatctggtgatgaatttccgaaactgcaaaggtgtcaccccataatattttttaaacatccgtataaaattagcggggtaatgataaccgcactgtaatgcaatttcatcgatgccaaggagtgtttcacttaacagttttgccccatattccatcttaagagagataatatagtcggaaatggtcgtgtcgtattcgtggagaaacgcataatttagtttttgcatggataaagaaacctgctcactcagttcatggatggtgggcgggtttttatattgttcggtcagaatatcgtgtgcgaggtgcacagcagaaaggtcagcggtcgagagcgtaatcgttcttgtatcgctgacttttattgtgtgcattactttgccatgtggaatatgttgttgaccagctttatttattgcggtccgcacagatgttgcaggcaaagttccagcagaaacagatttgggtgcaatcacatgagatgagttttcctcaaattcttctgcaagcagagcgagacactgtaagatcagtccttctaaatacagcggtgtaagcgcatccttttcatgcagaaaatgcatctggttcagcagattgatcactctggtggggagcattttataggtataatttgtctcgaacgcggacagactgacacagtcaggaaaaacaggatgaagaacattttctatgaaatcagccgaaaccgtcagttccagtccgtgaaaatgatccccggcacgccatgcctgctgacctttgatattttcctccagtacaataaaagaagaaggtgtaaaagaagccgcatccttttgataaagcttaaaatgcgtcttcccggaaagcattaccccaaaccgaagctgtctcgcaggattccgaaaagaaaccgaaaaatcctccggaatcgtataatccgcaatcccaagctgataacacccctcgcggcaataaatacagcaatacccaccttccgggtgttccctgtcactgtaacaggtataatttccattcatttccggtaagaaatgaagctgttcaaacataaaagcctgaaattcatctgtacttgaaacaagcatctaagaaaaacctccttcttaatttctataccccattttccccattcccgcaataaaataatcatttgctaaacaaaaattatcaatatccatgcaacacttgcaaacaatcaaatgcatgataaaatagacttacttttgttagcgcaaactaacacttgcaatatatattgcagtttgcagacaaaacaattgcgaagaatgaaaacaaaacataaaggagaacttttacatgaaaaaaaatcatttattttccattatcacggcaggtatgcttaccatcaccctgttagcgggatgtgggaatacaggcagcaacgcaaatgcagacacaggaagtaacacaaatacggtgcaggagagtacagaggatcaggcatccgcagtaccggagagcgaagcgcagataaccggggaaggacaaaatggtgagacaattattgtgacggacgtccgcggtgaggtggagattccggcagatccgcagaggatcgtagatttaagcggcaacagtgatatcttatcgatccttggctattccgttgtgggaaccgcaaacagtgatgcttatgactatacaaaattcccaacctatcttgaggatacattacagggagctgaaattttaggttacagtatgcaggatacgatggatattgaggcagttatgaatttagcccctgacctgatcatcatttccacggttcaggaaaaaatgtatgaccagctttctgagatcgcaccgacagtcatgatccagttagaagcgctgaactggaaagaagatatccgcacgcttgcacaggtatttggcagagaggatgcggcagatcagtggatcagtgcatatgaagagaaggcgaaagaagcaggagaagcagttcgtgctgcgtatggagaggataccagttatctgtcatttttagcaagcggtggacagttctttgtattcacaggtgccggatttggaagtgtgctttatgaagatatggaacttgcaaaaccggaaggtctgccggagcagagtgatatttccctgccggtcgtaacgtatgaaggtctggcatcgatcggagcagattatattttcctgatggcaacggatgaagacaaagcagaacttgaccagaatgcagtctggaacagtctgccggcagtacagagcggacaggtggtagaacttccggcatcaccgtattttaatcagggttacagtccgatcggacgtgagctgcttttagatgagattttggagatgttagatggaacggcaaagaattaagcggacctggggtgttacgattgcaggtgtctgtctgctgatactgggagttttgcttgcagtctgtatgggcgcaatgaagattctgccggtggatatctggaatggcatttttcataatacaggatctcttacggatatgatgatccgcgacgtacggcttccgagggtgatctgtgtactggtgacaggcggtatccttggaatgaccggagcaatgatgcagggggtgacgcgaaatccgattgcggaaccgtcactgctggggatcagtcagggggcgacgctttttgtcgcccttctttatgcgtcgggagttggtgcaactgcgggaaatacgctgcttgcagcattgcttggagcgtttttttccggcgtgcttgtacttatatttaccatgaaaaatccgggaaatttaagtatcacaaaattacttttagcgggaacggcaatgagtactttttttacggcactcacttcggtagcggggcttttgtcgaaccagtcacagatggttggattctgggtatccggtggatttcgcggggcaacgtggctggatgtaaaaattattttagcggcagggataccgggatttctggcagcagtgctccttgcaccgaaaattaatgtgataagtctcggagatgatatggcaaccggacttggtatccatccgcagagggtgcgttttatcacaattcttttgatgattccgttatgtgcggcagcagtggtggtgggaaaaacaataggttttgtcggacttatgattccacagacgataaggctgtttgcaggtacagattacaggcgggtaattccgcttagttttctgtgcggagccgtacttttaacttatgcggatattgcagcgcgcatgatctatcagccatatgaagtaccgattggaatttttacagcaatgcttggagtgccattctttttatacatggcgggaaaggagcggggatgatgcgtatgaaaaaaagaaaaacagcagtttttgcgtgcgtgatcgtattatttttctgtgccatcctcttgggactttgctggggcagttatgagatatcggtgcatgaagtcattgcgacgctgcttggaaatggaacaaaaatacagaatacggcaatttttggaatccgtttaccgcgtatcctgcttggtatttttgtggcggcagggcttgcgatatcgggcggtgttttacagacaatgacaaggaatgagcttgctgacccgggaatcattggcatcaatgcgggcggtgcaacggcagcagtgttgtttatccagtttcagacaaacgcatatttcagtgaacttgggacattttctatttatctgcttccacttatggcaatttcaggggcacttgcagcggcattttgcatttattttctctccagcaggaaagggttaaaaccaaaacgtctgcttttgaccggaattgggatcaatgccggactaaatgcgtttatcactttttttatgttcaagggaggtcctggggattacaaccgggtaatgatctggacgtccggctcactctggggggccggatgggcatacgtcagagctttggtacccgtgattttacttggcggggcatatattttttataaaggccgaatgttggacgcgttaagtttttcggatgaaacggcgattggctggggaatttccatcgagcgtgaacggaaaaaaatgttgctctgtgcagttattcttgcgggagcatcgactgcatttgctggaaatatcggctttatcggactgcttgcgccgcatgcagcaaaaaaagttgttggaaacggacaccgggtatcactgcttcttgcggctttgatcgctgcagtcatgctgatttttgcagatacggtcgcaggaaatttattttcaccaatcgaaatcccggcgggaattgcggtgtcgctggttggtgtaccgtattttgtatacctgatgtggaaggagtagcgaggatatggaaacaataaatgcgatagaggtaaaaggactctgggcggcatatgaggaccgcatgatcatagaggagatgaatttaaaaataccgaagggaaacatcacgatcattatcggtgcaaatggctgtggaaaatccacgctgttgaaagtgatttcaagaattttgcctgcaaagaggggtgaagtccggattgatggaatggatatccgcaaagaaaaagcagaacatatcgccaaaaaagttgctgttctcccgcagactccgacctgtccggatgcaattaccgtgcgtgagctggtttcctacggacgttttccttaccgcaaagcgattggaggcatgagccgccacgacatagagcaggtggactgggcacttgaaaaaacaggtctgacagaaatttccggccgccttgtgacagaattatccggcggacagagacagcgcgcatggatcgccatgacacttgcgcaggagacggaaatgatcttgcttgatgagccgacgacatatctggatatggcatatcagctggacgtgctgcagcttttagagcgcatgaaccgggaaaaacagcttacgatcgtgatggtgctgcatgacttaaacgaagcctgccgctttgcagatcacattattggactgaaaaatggcaaggttgtctgtgagggaaaaccggcggatgtgatcacgagggaaaatatccgggaaatttatgggattgatgcaaaactggtgatgagtgatggaggatacccgatctgtatggaatttgacagagttataaaaactttatgatttgttcgatttacaaccgtaattgactatgataatttaatattaaggctctttggtggggaaaatgcgccggagagtcttttcttttgtacgattcccgccatccgaaaaaatagatggttttgatgacagatatctgtccgtaaaaacaggtttatctgtgaaatatatcatctattaatcagagaaggattgggggaaatatctatgaaatcaggaaaaaaagtcatccgggtggcattagccatcctctgcatggtttccatgctttttatttcagagtatcagaaagtagaagtatatgcagcctcaggatatgggttcattttcttaagtgcatatgaaaaaacattaaaaacaggggacacttattgtctgtctgtggtttcatccggcagtaaaaaaccgacatttacatccagtgattcaaaggtcgcatcggttaatacctacggaaaaatcaccgcaaaaaaggcgggaagtgcgacgattacggcaaaaacaaaaaatgcggaggcaagctgtaaggttactgtcacaaagacaaaagttaccttaaataagaccagcctgatattggaaaatggggaaagtgcagtgcttactgcagcctcatccaccggacataaggtgacgtggaagtcggcaaagacaagcattgcatcggtaagtgaaaatggaaaagtaacagcaaagaagccgggaacaactacggttactgcaaaggttgacggtacatctgtgaattgtaaagtgacagtaaaaagtccgacagtccgcctgatgccgtctaaaatctcgttatacagacgggaaaagtataaacttaaggtatcttccacatcaaaaacaacaccagtgtggaaaaccaacaaaaaaagtgtggcgactgtggatgaaacaggaaaagtaaccgcggtcaaacatggaacggcagtcattactgtaaccgtagatggagtcagcaaaaattgtgaagtgacggtcagatctccaaagattacatttgagcagacgacgattacacttcatccgggggaacgtgcaagagtaaatgcgacggtatcttccggcaatcagccggcgtattcctgctctaactccaatgtggtgtcggtagatgcaaacggggttatcactgcgaaagcagctggcaggtcttatgtctacgccagtgaggatggaacaaaggaacgcatgacggtgtatgtgaaagagaaggaataaaaggtgcagggattgttgtatagacaaaaactggaataggaacaaaagcacaaagtcaggcatggcatcagattgtgaaagaaaattgctgctgttcacacaataggtgtggacaacagcaggaaacagatggcgggaagtacaaaagataaatggaagttgcatgtttacaccaaaaataaaatccgctaaaatatagaaaattacagaatgcagatacaattcacaacaatagaatgttcgcaaagcgcaggctattattttttatatcggagaaaggcggtagtgaggatggaggatatgacagaaaaagaactgatcacggttttaattgataaatatacagatttacagcgcatcaaacgtgcaaacaatggggtggaaaatcaggagctggagtatcagatcaaagtgacgattgcaaagctggcatctcttggagtgtccgtggaggatattacgttatgacagaaaaagaatggcgcatgttcaatgacattcttctggaaatctattatgccggaagcctggagacgtttggagaaagatgtttaaaactgatccgtatattgattccatatacgcagggttattttttagtgatagatgaagacggcaggttagacgtggcgcattcggtatttgaaaatgtggatcctgtcatgaaacggaaatacttagatacttattttgcaaaagactatctgatgcagatgtgcaattttacaaaatcaatggcataccgcgataccgatcttttaacggatgagaaacgaagagcatcggtgatttaccgtgagtattttaaaccccagaaattagatatgggatgcgggcttatcatcatgagatggaaattttgcagacatttctgcctcattttgaaaaaaatgtttttgcctatgcaaaccattatgtttcgggtgcggctgattattttgatggcatcgagccgctgccggaagaatatcagatggtaaaaagacggtacagtggtttctttgggacggatctggagattttgttaaaaggacttggcgttgaacatatctatgcagttggtcttctgacggatgtctgcgtacattatacctgtgcggatgcgcatcagcatgattatcacattcatgtggtgcgcgaggctgcaggaggatcctctcttgcggcgcatgaggcagcacttgcggcaatcgaatatttacagcatggatcagtgagaaagaggtgtgtgaatgatgaagaaaaaaataattgtgatggtatttgttttgacgatggcgtcaaatccgtttgttggattggcgccattttatgttgcgatggataaaggatttttcaaggactgtggacttgatttttccatggtggattttgatgattcgagtgcatcctgctcagcattgttagctggaaaagttgatcttgcgtatacaactttggatgcagcgatcattgcggagagccagtatgaagaagatatgttagatgtaacggcaatcgtggacgagtctgccggagcggatggaatccttgtcaaaaatgatattaacagtattgcagatctgaaaggaaagacagtcggcgtgtctatcaatcagacttcacattatctgctgatgcaggcgctggagacggcaggtcttacagatgcagatgtagatcttgtcaatatgacatcttcggatgcaggagtatcttttatcagcggtgatctggatgcggctgtcacatgggaaccatatcttagcaacgcggtagagcagggagttggaaaactcattttttccagtaaagatgccccggtttctattttgataaaggaattattgagaagccagtggaaccgtcacaattactggcagaagaataatagcaggatccggctgcttttaacggatattgtcgtatgatttttcctgtgatagaattggggaaaatacgagttggaatgagcagatatggaaaacacattaaaagaaacagaatggctgaccatcaataaagtgttgctggaaatgtatgatattaccgatattgatcaatttacggaacgggtgttaaaaacttaccgtatgttgatcccatatacgaaaggatattttattgtttttaatgaagcaggcggcattgaaagcgaaaaatcgtcctttattgagatggagccgggagtctatgaagaatatctggattcttattatgaaaaagactacatgaaatatacatttgaattgtctgagcatacgatcacttaccgtgataccgatattatggaggagtcactgcggcagaaaacagagttttatcagggatttttaaaaccgaatcatatcccgtttggcgcggggatactgcttcgcagatatggaaaaccgattggtattgttaattttttccgaagtgaacttcttggggatttttcggacaaagatatgtttatcttagaagtgctaaaggggcacctttcccataaactggcaggactactcaatggaacaaagcaggcggcaggcgacaggaataagatgcttgcacatcttgcagcagaatttgaactgtcggagcgtgaaaaagaagcgctgctctgtatggacgggggcatgtcaaacgcccagattgcggaaaatatggggatcagtctttctacggtaaaaaaacatgtttaccatatttttgaaaaagtaggggtagacaccagagcgcagcttcgtaatgttttagagacatataactctacaaagttctaaaaaagttctaattatacagaaaaaaatgcatacaaagttcaattgtcacattatttttccgatgctacaatcagtgcataagaaaacagaaagaggaaatgcaaaggtgcataaaaagcagcctttgcgtttcctctttttttgtacccaaaataagcgtttgatcagcagattcaaagaaaggtggaaattattatgaagaaaatctggagcaggacattaagaccgggagaaaaatggtcaggaaatatgggacgtggaaaatatattcatttcaaggcgctcggcgatgacgcaaatgtttccatgttgatgtacaacatgttagatacttcggagcgctataacatgccggatacgttaaaagcacagtttatttcctccctgacaaaaggaaatgtgctgatgagcgataacggacgtgtgctggcaagtatcgtggaggacagccttggatggcatgatacgatctcaggatatacgacaaggcttctcaccgatgagaaatacggaaagacaacttatcaggaaatgagaaatgactggcaccgttgcggagaggaaaacttcaaaatggaacttgtccgcaacaatatgagcgcgagagatttagtcccgtgcgtgaaccttttctcaaaagtttacattgaggaagatggcagcatgcattttgaggaaggccactgtaaagagggagcaaccgtaacactccgcacggaaatggatatgatctttatcgtatcaaatacaccaaacccgttagatccggcaaaagaatttccttcggttccggtttccatcgaagtatatgatgcaccggaagttgatctgaccgatgaatgtgtcaactatcgcccggagaactacagagcatttgaaaatacatgggaatattacaacctgctgggacgttaaaaagtaacgcatcacagaaaagctggaacagaacggagcaaagtcagtaaagatcaggcagaaaaattgctgtagaaaacggaggttaagatatgtacggatttatagagaaaacaagtgatttaaaagaagaaaatgcaatttataacgaagtcgtggaagccgggaaaggctggatgcatgaactgcttccgggacagtccttaagaattgtagacatggaaggaaatcaggcagtcgatactacattttatgatatgaccaacccggaggatcattacggagcaattccaacgatcgtgatgcagaaaaatatctatctgactacgggtacgatccttagaaccgagtcggggaaaccgctgttagagatcacagcagatctgaccgggcgtcatgatacgatcggcggtgcatgttccgcgcagagcaatacagtaagatatgcaagagaaaaaatttacatgcacaactgcagagacagcttcatgttacagcttgcagacgatacgcatggtttcatgaaacgtgaccttgccccaaacattaactttttcatgaatgttccggtgtcaaaggatggcggttcaaaattcgatgatggtgtttctgcaccgggcaaatatgtggagatgaaagcgttagagcatacgatggtgttagtcagcaactgtccgcagctcaataatccatgtaatgcatacaacccgaccccgatcaggatgctgatctgggacgcagagtaaaaatgtgaaaaaagtttggaggattccctatgtttgataaagtactgatagcaaatcgtggagcaatcgcagttcgaattgaacgtaccttaaagaaaatgggaatcggcagtgttgctgtatattcgaaggcggatcaggatagtttacatgtggaacgtgcagacgaggcagtatacattggcgatggtacggcaaaagagacata

SEQ ID NO: 5179 - DNA, 4146 bp, Unknown
  gut microbiota DNA sequence
aagttcattggaccggattctgaacagatcaagttattcggtttgaaacattccgcaagagcacttgcagagaaggcagatgttccactgttacctggaaccggacttttgtccggagtggaagaagcagttacagaggcagaaaaaatcggatatccggttatcttaaagagcaccgcaggcggcggtggaatcggaatgaggatctgtaactccaccgaagaattaaggcaggcttatgatgcagtttgtcatctcgctgcagcaaactttaacgatgccggcgtatttcttgaaaaatatgtaacgcgttcccgccatgtggaagtgcagattttcggcaacgaatacggtgagacaacagcactggcagagagagactgttcggtacagagaaggaaccagaaagtagttgaggaaagcccggcaccaaacctttcggatgaagtcagggaaaaaatgtatgcggcagcagaacggcttgcaaaggaagcttcctacagaagtgcgggaacggttgaatttttatatgatgatcagacggaaggattttatttccttgaggtaaatacaagacttcaggtagaacatggtatcacagaggaggtatttgggatcgaccttgtggagtggatggtcaaagaggctgccggtgagttaaaaaatataaaatcactggtacataagccgcagggacatgcgatcgaggttcgtgtctatgctgaggactgcattaacggattccgccctggcacaggaaagatcgatgcggttacattttcaccggaagcgcgtgtggagacctggatccagaaaggtgtggaggtaacatccctttatgatccgatgcttgcaaaactgatcgtacatggaagtgaccgtgccgatgcgatcgccaagatggaacgtgtacttaaagattcaagagtgtacggaattacctcaaatatgcagtatttagcagcactgttaaaaacagaaacctatcagaccggtgcattatttaccggaatgttaaaagattttatgccacaggagcatgcaatcgaagtacttgacggcggagtacagacaacggttcaggattatccgggcatgatcggttactggtttgtcggagttccaccttgtggcccaatggatgcttataacttccgaattggaaacagcattcttggcaatgatgagagtgcaccgggattagagctgacattaagaggcggcagttaccgtttccgtacaaccgtaagtttctgtatcacaggtgcagatatgaaggcaaccttagatggagtggagatcccgatgtatcaggtggtacatgcatccgccatgcaggtgttgaaatttaaagactgtaaagtcggaatgagaacctatctcttagtggcaggcggatttgatatgccaaagatcatgggcagcagttctacctttattgatggaaaattcggcggacacaacggacgtaccttacgcaccggagatgtgcttcgtttacaggaaaaatgtgtgatcgattcgatcgattccatgccggaaaaatatcgtccaaaactgacgaatgagtggacgatcggtgtgatcccgggaccacagccgacaccggaatatttgaaaccggaatacttaaagaccttaacagaatctgagtatgaggtaaactttaacagcgcgagaaccggtatccgtttaaatggcccgatccctcagtgggtacgggaggatggcggcgaggcaggacttcatccgtcaaacattcacgacaatgcctatgcggtaggtaccctggatctgaccggtgaccagtccattttacttggaccggacggtccgagccttggaggattcgtatgttccgtgacaacggcaaaaggcgagatgtggaaattaggacagcttcatccgggcgataaagttcacttcaggcttcttgatttagatcaggcaaaggaaatccgggaagcggaggaagcaaatcttcgtcatgaatataaagaagttgtactgccggagcaaaaagatcttgattatcattacgcaatcctcgcggaggaaacggcagcgggaacaaagatcgttgcaagacttgatggtgaagataatattctggtggaatacggagagatggaactagatattgcgatccgtttccgggttcacgttctcatgcaggagttaaagaaaaaagatctgccggtcattgacctgacaccgggcatccgttccttacagatacattttgatatcgaaaagatttcccttaaggaaatgcttgcagcggtacttgaaaccaaccgcacattaccggaactttccgatgtaacggttccgtcaagaatcatctggcttccgttatcctgggatgatccgcagacacagcttgcagcgaagcgttatcagcagacggtaagaccaaacgcaccatggtgtccgagcaacccggaatttatccgcaggatcaacggcttagacagcatagaggatgtaaagaagattgtatttgatgcggattatctggtacttggacttggcgatgtttatcttggagctccggttgcaacacccgttgatccgagacaccgtatggtaacgaccaaatacaacccggcaagaccatggacaccggaaaatgcagttggaatcggcggcgcatacctgtgtgtatatggtatggagggtcctggcggttatcagtttgtcggacgtaccattcagatgtggaatccgttaaaagagacagaatatttcaaacatggaaaaccatggctgttggatttctttgatcagatccgtttctatccggtcagcgcagaggaaatcttaaaagacagagaagattttcttcgtggcaggttcaagattaagatagaagagacaagcttcaaccttggaaaatatgagcagttcttaaaggaacatgaagatacgatccgggcatttaaagatcatcaggaagcatcttttgaggcagagcggaagatgtggaaagaaaaaggactcgatgagtttgattccgagacacaggatgcaccggcaatcgtggaagaaaccgtaccggacggctgtgaggcagcaagaaccaatattccgggaagtgtatggaaggtattagtcgaggacggacagaaggtcagagagggggacactcttgtgatcttagagagcatgaaaatggaattcccggttacggcagagtacagcggaatcattgaaaaagtatatttaaaaccgggcgaacaggtaaattccggacagcttgcggcaagtatccgcgtgtaaaaggagagtgataaatatgaaatatttccccaaaaaactgacaatgacatggatcagaaacagttataaagaaggatcacttagtccggaggagcttgccggcgagatcgtgcgccgggcagaaaagtacagggattataatatctggattgtcgcgccggatctgaaacggatgatggattacattgaaaaacttccaaaagatatggaatcacttccattatggggtatcccgtttgcagtcaaggacaacattgatgtggcgggatctcctacgacagcagcgtgtccggattatgcatatgatccaaaagaagatgcagcggttgtaaaaaaactgatcaaggcaggtgcatttccggtcgggaaaaccaacttagaccagtttgcaacaggtcttgtcggaacaagaagcccttatggagaagtaaaaaacgcacttgatccagagctgatcagcggtggatcaagttccggttccgcagtctctgtggcacttggaatggcagcgttctcactgggaacagataccgcaggttccggccgtgtaccggcagcattaaactgtctggtcggctacaagccgtctctcggcgcctggtcgaccaaaggagtggttccggcatgcgcaagccttgactgtgtcaccgtgtttgcaaacagcctggaagatgcagagaaagtcaaccttgcggcacgcggcgtggatgaagagtgctgctggtcaagggagtacaaagagccactgccaaaacttccgaaaaaaatctgtctggcaaaagacggtgtgacattttatggaccatatgcagatatttacaaagcaaaatgggaacaggcgaaaaagcggatcgaggatatggg

SEQ ID NO: 5180 - DNA, 32374 bp, Unknown
  gut microbiota DNA sequence
gagccacccgggaaaagtatttccggtaacagaaacaattttaaggtcaggcgataaaccggagcacacggcaagaaaagtatttgaggcgatgcaccagttacaggaataccggatgcgggcaagacagattttgaaggatgcagttctgatcatgccaacggcgggaggcacattcaaaagagatgaggtcagaaaagatccgatcgcgacaaacagccagatgggactttatacaaatcactgcaacctacttgatatgtgtgccatagcagtaccggaaaatacagcggatacagagcttccatttggaatcactattttctcattatccgatcaggagggcgagatccttggtacagcggaacggtttttacagacacagagcattccgtttgcggtatgcggactgcacaaaaaaggatttccattggaaagccagctgacagagcttggggcttcctatcgggaaagtgtaaacaccgcaccacattacaggctgtaccgtctggatacggtaccggaaaaaccggggatggtgtatgacgataaaaaaggcgctgcgatcgcagttgatatctatgaactgccggttgtgagcatcggagcatttttacagcaggtaaaaaagccactctgtatcggggatgtggaattgtccgatggcaggattgtaaaaggatttctgtgtgaggaatacgggctggcaaacgcaaaggagatcactgatatcgggaagtacgaagtgtaacaataaagacgtaataacaaacatgtaatgataaaaggcataaataaggaatgaagtagttaatgaacaataagcaggaagaaatggaggaaacaaacatgaagatgataaaagcgattgtcagaccggaaaaatcagaggatgtgctcgatgcactgcttgcaggcggttttgcagcagcaaccaaaatgagcgtgcttggacgtggaaaacagaaaggtttaaaagtaggtgacacctattatgatgaaatccccaaagaactgatcatgcttgttgtggaagatggggacgtggataaggtgctgaaagtaattgttgagaacgcgagagtggataaaaacggaacctacggagatggaaaaatttttgtcagcgatgtggagcgtgcaatcacgatcagcagtggaaaagacgaattataggacggaggtgccgcgatgaaagaggtaatgattatattaagacctaaaatgtattttccgacaaaagatgccttagaccaggcgggatttcattccatgacgatccgtgagatcatcgggcggggaaaatgtccggtacattacgattatgatgagggcgcaccggtaaaacacagactggtcgcaaaaagaatgatcgatatgtttgtcagggatgaagatttacagaaactgatcgacacggtcgtggaggttaataagacgaatcatgccggagacggaaaaatttttgtacttccggttaatgatgcgatccgcgtaagaaccggagaaaaaggaatcgaagcgatcatgtaagcgtagtaagaggaagaggaggacaaccatatgaaaaaaattaagagaagtatcagtattctgctcattgcaatgatggcacttgccatgttaggaggatgtggaaataacagcacatcaggaaacagtacagcaaatggtgatagtgcaaaagcgacggaaaagaccgcagatgcaggagaggcaaaaggaacagagagcaatccgttcatccttggtgtcagtccgatgtccggctggtatgcatggtatggcgtgaaggacaccggtatttttgaacagaatggtgtctatgttgacctccagttcttcccggtatacagtgattccctaactgcattctattccggtcaggtagatggtatctgtatcgcagcttccgatgcggtagcgccggtcaatgagggtgtggattttaaagttgttttagtcaatgataactcctacggtgcagatggtatcgtggtacaggatggaattaacagtattgaagatttaaagggtaagacagttgcaactgaggttggtaccttagagcatatgtttttgctgaaaatattagaagaaaacaatatgacggtcgatgatgtcaactttgtcaatatgacgatcaacgatgcaggcccggcattcattgcgggaagtatcgatgcagcagtgctctgggagccgacactttccacagcgataggtgcaggtggaaaacttttgtacagcacaaaggaagagcctggtttgatcccggatacacttgcggtcagacaggaagtgctggattcaagttccgatgcggtacagaaaatcgtcgattcctggtttgatggtgttgaaaaattaaatgcaagagatgatgatttcattcaggcaatctgcgacggtgcagaacttaccagagatgattatatgaccatgttagacggtgttactatttttgataaggcaaagaatgaagaaacttttaaagacggagatgattatacctatctttcttatacgttacagaaatcggcggagttcctgttatcaaccaagatgatcgatgagatcccggatgatttaagctctattttggatgatacctacattaagggggcagaataatgattcgaattaagataagaaaggaaatcgacagaaaaaaatatctattgtttgcaatactttcatttgtcattgtacttgctgcgtggctgattgcaagtgaaagtggtgcgatcaaggaaatttttcttccgaaaccacaaaatgtggtgaactactatatagagtccatcaaggatggaagcctgcttcagaacacaggcattagtatttaccgtatcactcttggttttgtatatgcggttcttttaggtgttccgatcggtattttagttggaacattcaaaaaggcagaagcatttatccgcccactgtgtgagtttgtccgttatatgccggttccggcatttgtacctcttatcatggtatgggtgggaatcgaagaaagtgcgaagatcacggtcatttttatcggtacatttttccagcttgtattaatggttgctgatgatgcgcttgcggtaccggatgatctgatcaatgccggttatacgttaggttcaaacactccaaagacgatctttaagatcctgattccggcaatgatgccaagactgatggaaacactgcgtatgatgatcggctgggcgtggacctatttggtcagcgccgaactggtagctgcaaatacaggacttggatacacaatcttaaaatcgcagcgtttcttaaagacggacgctatttttgccaacattattttgatcggtctgctaggactgattacggaccgtatttttgcatttttaaataaaaaactgtttccgtgggcggctgcgtaaaccgttagaaaggtaaggttttagcatatgggattttttaagaaaaaaaagaatatacttccgcctgcggaagatcatatagaggcaaatcttgcaaacagtaccgtttatgtcagagatctgcagaaaatatatccatctgccaagggcgatgtccaggcgatgaaagatgtgaatatcaatgtcatggaaaatgaatttgtttcgatcgtaggaccgtccggctgtggtaaatccactcttttgcgtatgatcggcggtcttgacactgcgacatcgggaaagatcgtcattcaggatcgtgacatcataggtcctggagcggatcgtggcatggtattccagtcctatacactttttccgtggatgacagtcggagataacattaagtttggattaaaactgcgaaaaatgccggcggaccagcaggaagagattctgaataaatatttaaagatcatcaaactggaaaaattccgtgacagttatccaagggagctttccggtggtatgaaacagagggttgcgatcgcgagagcactggcaaacagcccggaggtattactcatggatgaaccgttctctgccttagacccgcagaccaaagcggacatgcagcttttaatgcgccagatctggcaggaggaaaagccgactgttatttttgtcacacacgatatagaggaggcagtctttttatccagtaaaatttatgtgctgacacagagaccgggaaccgtaaaggcagaggttccggtattgctgccatatgatcgtgatctgtcactcaaagatacggatgagttcattgaacttcgcaggaaggtgaatcaattaattgaacatgaaagcttatcttagtataacgcaggattttcttgtcaattttacggagtggttttataatgtgctaataagaatcagcataatattccgaaaatggagagaacgatggcaggaaaattatatttatgtgcaacaccgatcggcaatcttgaggatatcacctgccgggtgcttcgcacattaaaggaagtggatctgatcgcagcggaagataccagaaattcgatcaaactgttgaatcattttgagatcaaaacgccgatgacaagttatcatgaatacaataagatagaaaaagcatatcagcttgtagataagctgcgggaaggaaaaaacattgcactgatcacggatgcagggacaccgggtatttccgatccgggcgaagatttagtgcgcatctgttatgaggaagggatcgaagtgacttccctgccgggagcagcggcatgtattacggcgcttaccatgtcagggcttccgacaagacgttttgcgtttgaggcatttctgccgcgggagaaaaaagagcgggctgctattttacaggaattaaaggacgaaacgcgcacgatcatcatttatgaggcgccgcatcatctggtcaaaacattagaagaactgtatgatacgctcggagaccggcagatctctatctgccgggaactcacaaaacgctatgaggaaaagatgcgtacgacgttgtcggacagccttgtctattatggtgaaaatgagccgcgcggagagtatgtgctcgtgattcatggaaaaaccttcgaggaacttgccgaggaggcaagaaagtcctgggaggatatgtcgttagaggaacatatgcaggtatatgaaagccaggggacaccgcgcaaagaggcgatgaaactggtggcaaaagaccgcggcatgagcaaacgggatgtatatcaggcactgctgaaggaagagtagattcgtcacttctggtaaaaatctttcagataatcctttacgatttgaaacggtgccgggccgatcgaaagcactgcctgatgaaatgagatttcattataatcactgccaaagatttcctttgcatagtcctttaattccagaaactgcagataacccacataataacggagataatttgccggttctgatatgatatagcggtaaatctctgcaatggtgtccggatcgctgatcccgtaatcgttccagaattttatcgtatcggcaagcgaccagccgtcataatggatgccgatatcggtcgaggcataaaggcttaaaagggcagactggtttaaggcgagaagcgttgcggcatcctccctcagcccggcataatgataggacatcatctccacataggtcgcccagccttccacatatcccggatagtttaaaatactgcgtatcgccggcagtccggactgataggacatgatcgtctgatacaggtggccgggaaaaccctcgtgggcgagcgttgtgaaataccgcatggtggatgcatccgtttttgcattgatatagattgaattggcattgtaatcatcaattggtgcagtgatataataagccggtgcaagataatcttccatacattcctcaataggactgacggtgtaagagacatccggagcctttggaaaatctgcctgcatctgttctttcaactgttctaaaacagaggcgggttctgcataggaaagagaagctttctgtgcatccttccagagagagggatttgaatccgtcagggcggccgcttcacttagatcagaaagtcttttctgaccgatcatagtctgtatatccgcaatcgaatccgcacagccggtattttcgtagacaaggtattcgtaataatctctgccgtgtttcagataacagagccctttttcattttttccgctgccaagcaggctggttaaggaagatgccagtgaagtataggcagggaaaatcacttcttttacaatcttttcattttgttttttataggcggtcttctgttcatctgacagatccttaaaagcatccacttttttattgaaagttaagatcagataatgatcgtccccatcgtctgcaaaacgggaacactgttcgatcacacttttacagatggcatcggacataaagagcccggcggcagctttttgtttttcaaaagcaatgatctggtcaaaataggaaccggtcaggggcagcagtttcaggtaagttttgatgtcatcttcggaggaaaaacgatactcttcataaagtactggaagctgtgcctgagtgccggaggaagggtttaagtattcttcataaagtgaaaaatcagtccccttttgctccatggcaaggtaatccgacaaaatatcgtaagtcagctgccggggtttggaaagtttttcgcggtcaaaacgttttagggcggcagtcgtgttttccagggctgcacggttttcctttgatgcctgactggaaatactgccaagtgaaattggaacttctgtgattccgtaagattccggggaggagagggaaaaatgaaggtttatggtattcagggcagcctccgagcggaaaagctgcagtaaaaattcgtcaaaggcattcgcggaggagctgtcagcgcgttgattgtcattgtcagtagattcagaagaaacagaatctgtctgctccggttcatatccggaagagatacgggtagactgatccggagcatgcctggagaaagcgcatccgtctaagaaaactgtggggaaaacgaccagcaaaatgagaaaaagtgtggatatccggcttaagcgtggaaatttgtgaaaaatatcagaaaaccatatcaagataaaatacctcagttcaaaaatccaggtgttagtgatatatatgttgacatttagaaaaaataactgaaaaagttctatatgaataatggtacatatatggcgatatatagaaataaaataaaagaaaaaccggagaggtacatatgaattatctctgggcatttatgatcttgacaggcgttgtatttgccgcatttcacggcacacttccggcggttacgcaggcagcgcttgactcggcaaaagaggcggtaacactctgtattaccatgatgggagtgatgtctttctgggttggactgatgaaaatcgctgaaaaaacaggtatcattgcaggattgtcaaggcgtcttgcgccggtgctgcattttctgttcccggatattccaaaagatcatccggcaaataaatatattgccaccaatatgattgcaaatatattcggactgggatgggcagcaacaccagccggattaaaagcgatggaggcgctggcggaattagaaaaagagcgtggaaagaaagcattttcagatggcacagtaaaaaaaggggagcggaccgccagcaacgagatgtgtgattttttgatcatcaatatttcatcccttcagatcataccggtaaacattattgcctaccgcagccagtatggaagtgtgaatccggcgcagatcgtcggtccggcactgatcgcaacgacatgcagtacactgactgcgattattttttgtaaaatcagacaaaatatttacaaaatctgacaaataattcgttgtactatttgataaaagacattataatgagaatagatttatgtgtaagacaaatcctcagagaaagtgagggataccaatgaaaaaaaataagatcttgattgtagatgataataagctcaacaggcagtccctggctgatattttccgtaaagcttatcagatcgtagagtcagaagacgggaaaaaggcactggagtatctgaaaaaggataaaggactttcggtagcggcaattatactggatcttattatgcctgtaatggatggatttgctttcctggaggaattcaaaaaacacagcgaatataagtatattccgatcgtcattgcgacaacggaagacaatgtggaaaatgaaaaacgctgtctggagtatggggtatgggattttataccgaagtcattccaccgggagatcatctggtttcgtgtcatgaacgctatcaaaaggagcaaacagcactttttagagtatgattccctgacaggaatttataaccgtcagatgttttaccagaagacgagggagatgctagatgacagtaaggatcagacatttgcatttatccggctggatattgaccggtttaaaatgatcaattctttctatggtgcggcagaaggagaccgtctgttaagatgtatggcgcacaatatctgcggtgtactcagtgcatataagacgtatacttatggcagattaaattccgatgtttttggaatctgtgttgcggtagaaaaagaacaggatgcactgctgatcgcccagaagatccgggaacaggtgaagaaaaacggggagctgcgctgttatcttgagacgtcggcgggatgttatattatccgggacaaggagatggaggtatcggcaatctatgagcatgctgtaattgcagcacaggaatgcaaggggcagtatatgcatcatgaggcactctacacggaacagatgggaaaagagatgcagcgggagcagcagatcataaacgaaatggatacggcacttgaggaaaaacagtttgtcgtttattttcagccgaagtatgagttagatggttatacgccgcgtggcgcggaagcacttgtacgctggaaaaaaccggatgggacgatggtttcaccgggagagtttatacctgttttcgagaagaacggttttattataaaacttgattattatgtgtgggatcaggtctgccagcttattgccacggcgttaagagcaggacgtaagccggatccgatctctgtgaatgtttcccgtgtcaacctttataatccaaattttttagagtcactggtcaatcttgtggaaaaataccggataccaccggagtacctgcacttagaactgacggagagtgttttttccgatacggaaaatgtcatcttaaatgcggtgaattatctgcacaaggcaggatttacaattctgatggatgattttggaagcggatattcatctttgaacgtgttaaaggacattgatctggatgtactgaaaattgatatgaagtttctttccaaaggcaaagatgatgggcgcggagaaaagatcttagcggcagttatccagatggcaaaagcgctggatatgccggtcattgcagaaggcgttgaagaaaagaaacaggtacagatgctaaagagacttggctgtaattatattcagggatattatttcgcaaaaccaatgccgcaggaggattatgaacggctggcgcgaaaatcgcatgaataatgtgaatcgctgatacatataataaactaacagcagcttcgggaagtgtcctatgcagataatgatgtttttatccgatatcatgataccacttctgatttttttgattatcggatatgggctgttgtgcaggcacaatatctacgaagagtttatcgagggagcgaaagacggatttgaaacagtcatagggatcatgccaacactgatcggactgatggttgctgttggaatcctgcgtgcgtccggatttctggaatgtttttcaaatgtatgtgctattttcacagaaaagatcggattcccgtccgaactgcttccgcttgctgttgtgaaaatgttttcatcttcggcggcaacaggattacttttagacatttataaggagtatggaacagattcgcttttagggcgtatggcatcgatcatgctaggaagtacggagacgattttttacacgatgtctgtttatttcatgagtgtaaagattaaaaaaagccggtatacgcttgccggggcattggctgcaacggcagcaggaatggctgcgagcgtagtgctggcaggaatgatttgacaaaaagaaaaaaaggtctataataatgttatgtaaacgaacagggcatttgttctgttgcaatatcgcgggatggagcagtctggaagctcgtcgggctcataacccgaaggtcacaggttcaaatcctgttcccgcaactaaaaaacagtagtttagagctgcagaaagcagattgctagactactgttttttgatgataaaatttagcagtatcgtgggtggcaaaccttgaaaatgtatcgaaaatatactaaaattatacatgttaaaggtatattacaaaagggaaggtgaacggttatgcaaaagctgaaagacatgaagataaaaaagcggttaaataccggatttaaaatggtaacaggcattgcgacgatcgcagcagtgcttggaattattgcaatgctggtcgcgtctggccgatatgaatatgcgatgactaattatggattttcgcagggagatatcggtaaggcaatggttacattttcagagacgagaagcgccctgcgtgctgttgttggatatgatgaggaggacatgatcgaggcacaggtatcgctgcatgatcagaaaaaggaagcctttgaaacatatctgaaagacatagaaagtaccatggttttcccacaggcaaaagaggcatataatacgttagttacggatctggacggctattgggatattgatgcagaagttttagagcttgcaacatcatcttcggatgatggttatttaaaagcacaggaaatcgacaccggtgaactctcaccacagtatgacaaaatttatcaggatctggcaacactgatggatctgaatgtacaaaagggtgatgcatcaaaggcatcattacataatatggagctcatatttatgatcgtgatcatagcggtgatcgtggtctgtattgtgatttccatccgtatcggaaacacgatagctgtagatatagaaaagcctctgacagctttggcagaacgtctgaaatcatttgcagaaggtgatcttgacagtccgttcccggagagtgaggcagatgacgagatcaaagagatgatcttagaagcagaacagatggcgcataatctgaacctgattattacggatgcaggggagctgttaggagaaatggcggctggtaattatgctgtcggaaccaggatcgaaaataaatatgtcggaaaatttgcagccttaaaagatgccataagaaagatgaaccgtcagatgaacagtacgttacagcaggttgaagatgcttcaaaacaggtttctgctggttctgaaaatctggcagaatctgcacaggcactggcagaaggggcaacagaccaggcaggttccgtggaagaactgacggcaacgatcacgaacattacggacaatgtcaatgccacggcagaaaagcttgaggcatcacaccagaaagcaagccagtatgcaaagcaggcagataacagccgcgaacagatgacggctttgacggatgctatgggacggatcaatgagacatcaaccaaaatcgaaaatattatttctgatatcgaagatattgcaagccagacgaatctgttatccttaaatgcagcgatcgaagctgcccgtgcaggggaagcgggaaaaggatttgcggttgttgcggaccagatcaggaaactggcagagcagagtgcgcagtcagcagttgatacccgccagctgatcgaaggttccctgcaggagatcgcagaggggaataaggcggcagaaagcgcttctgcggcattagaggaagtagttgaaggaatcaaagagatcgctgaggaatcaaagatgttaagcgaacagtcggcagagcaggcaagagcgatggaacaggcagaatcaggggtaaaccagatctcagaggtggttcagtcaaattctgcagcagcacaggaatcatctgcaaccagtgaggagctgtctgcacaagcagtgtctttaaatgaactggtgggacagtttgtcctgagaaaggattgatcatgtcaaatatagaaaagttcttagaaatggtacaggagtcagataatattgtatttttcgggggagcaggcgtttctaccgaaagtggcatccctgacttcaggagtgtggatggactctataatcagaaatatgattatccaccggagacgatattaagtcataccttttatatgagacatacagaagaattttaccgtttttaccgtgataagatgctatgtcttgatgcaaaaccaaatgtgacacaccagaaacttgcagagttagaggctgcgggcaaggtaaaagccgtcatcacacagaacattgacggactgcatcagatggcaggaagcaggcgtgttttagagctgcatggcagcgtgcatcgcaattactgtcagaagtgtggaaaaggatttgatgcggaatatattttaaaatccggtacagagattccgctgtgtgatgcgtgtggaggtaagatcaaaccggatgtggtgctttatgaagagggattgaaccagcagaccttagaggaggctgtattttatatcagccatgcagatgtgcttatcattggtggaacttcgctggcagtatatccggctgcaggattgatcgactattaccggggaaacaagctggtgcttatcaataaatctacaacaccgatggatggcagagcagatcttttaatccaggcaggacttggtgaggtgttttcacagatccggtaaacagagtaagtactattttaaacgtctaaaaaggagaatgtatgcgtttactgataaaacagagagtgttttcatggtcagatacttatgatgtctatgatgaggagggcaatgtacggtattttgtcagggcagaggtgtttgcacttggacatcagatccatgtctatgatgcggcacatgttgaggttggaatgatccgtcagaagctgtttaatcttcttccggtctttgaaattgaaacaggtgggatcaaaagaggacagatcgaaaaacagtttactctgttccgaccgaaatatgatattgattttaatggatggcgtgtggagggagatttccttggctgggattatgatgtatattccggctgcagttccattattcatatttcaaaacaattactccactggggtgatacgtatgtgatcgattttaccaatccgggcgatgaactgcttggaatgatgcttgtgatcgcaattgatgcagcaaattgctcgcagaataaatagtataggagaatagagaggatttatggataaatatgaagttggtgatgtggtgcggttgaaaaagcagcatccgtgcggcagtagtgaatgggagatcctgcgcgtgggtgcagatttcaggttgaaatgcttaggctgcgggcaccagatcatgatcgcaagaaaacttgtggagaaaaataccagagaaatccgcaaaaaggaagctgagcaaggaagctgagtaaaaagttcttgcaaactattgatttttatgataaaatatatcttcgtgatatattattaaattccttgctcactcatatgagagcgggccagagaccaaaaggaggaaaattcgcatgaataagtatgaattagcacttgttgttagtgcaaagatcgaagacgatgcgagaacagctaccgtagaaaaggcaaaagagtacatcactcgtgccggtggtaacgtaacagaagtagaagaggctggtaagaagaaattagcatatgagatccagaagatgtcagaagctttctattatttcatccagttcgacgctgcatctactgttccggcagaagttgagcgcgatgtccgcatcatggacaatgttcttcgtttcttagtagtaagaaaagacgagaaataagattctttgaactgacaacggtttgtttgatagaagagaggaatcgtatatgaacaaagttattcttatgggaagattaaccagagacgcagagatccgttattctcagggcgagagtgctactgcgatcgcaagattttcacttgcagtagatcgccgtttccgccgtgacggagatgatcagaatacagattttatcaactgtgttgcatttggcagaacagcagagtttttggagagattcggacgtaagggaacaaaattcgttctggaaggtcgtattcagactggtagctacactaacaaagacggacagcgtgtttacacgacggacgttgttgctgaaaatgtagagtttgcagagagcaaaaatgccagcggcggcggagataattccggttttaacccttccgacagaccgtcaccgagcagtgcagcaggtgatggcttcatgaatattccggatggaattgatgaagagttaccatttaactaatggagatcataacaacaggaggtaattatcatggctttcaataaagcagcagacaaagatggcgcaccaatgaagagacgcccgatgcatagaagaaaaaaagtttgcgttttctgtggaaaagataacgtaatcgattacaaagatacaaacaaattaaagagatacatctctgagagaggaaaaatccttcctcgtcgtatcacaggcaactgtgcaaaacatcagagagctcttacagtagctatcaagagagctcgtcacgttgcattaatgccatacgtatgcgaataaattcgcaacgaataaattcgcaacgaataaattcgcaacgaataaaattcacagtgaatagaagaaatcccctgcaacctgctatatttgtattgctggttacaggggattttttaactgttccggcgttagatcagcgtgttattcctcgttggtcaggtcaaatctctgtacaagctgctctagcgtagtagcctgagcggcaagctcttccgatgtggcagaagtttcttcggcagcggcagagttgtcttccactcctttagaaatttcttcaataccaatctcaagctgttccatgctctgctcctgctggacataagtttcggaactctttgaaatcatttcatttactttctgaacagcctccatgacttcctgaatggaagtgacgacgtcatttacaatctggtttccatgttcaatttcgttaatggaaataccgatgagatctttggtcgtattggctgctttggagctttcctcggctaaagaacctatttcggaggcaacaacagcaaatccttttccggcttcacctgcccgtgcagcttcaatggaagcatttaatgctaacagatttgtctggtctgcgatatcttcaattgtcttaatgatgccgacaacctcattggaggtctgtgtgatcttattcattgcttctgtcattagtgacatctgatctttgctgtttcgcatcatatcagttacttttaatgtttcatcagccgcaacctgtgcagcagcagtattttcttttacctgatcggtaacagcagttgtggtggcaacaagttcttctacggaagccgattgtgtggtggcgccttccgcaatactttgtgctgctttggcaagatcctcagaaccggcagacacctgactggaagtgttgataatatcagtcatgatgttttgcatggattcagaaatattgataagaccttcttttacttttgaaaaatctccggcataatcatatttcagtgtaaattttaattttccatctgctaaacggtttaaggcataggtaatctcattaatgtaattaatgtattccttcaggcggtctaccgttaactggatggagtcagaaagttcgccgagttcattgtcagagtgaatcttaagggatacatcaaggtttcctttggcaagttcctgtgcaacatcatttaatgtactgatcggttttgtaatagcagaagcgactttgcggatggcaatgacagtggctgcaataccgatgacgatcagtacaagcataataaccatgcatatggtgaggctggaaaaatattcactggttggcagacaacttaaaacaaaataatcggtatctgtaatgtctacaatatatccatatcttgatttatttccaatggtatattttactgcggtatttccacctccaagagcattgactacattatcacttacaccaatctcagtaagagtttttaactgataatctgtatttggatggtaaatgatggttccgtcagatgttaaaagaattacaaaaccattatcacctactgtgtaggagaaaaataattcgttgatatggtctaaggcaatatccaatccggcaacaccgacaacattttttccggaaggatcgtatacgggtgcggcggcgcttaaaattaatttgcctgtgctgacatctgtgtaagcgttggtgagcatacttttaccggtttgtgttacctgataccagtctctttgcgtgatatcaaaagaactgtcactggtatagccgtctgactgggtcagaacattagcatcaatatcaccgatccaggcagcaagaatgttttcactgtctgttgcctgatgactctgcagctctttaaatacatcctgataaagggtggcttctttaatggaatcgccggatttagtttcagtcaggatttcccgtatatcgggattgagagccatctgttccgcggtagttgtgtactttttaaaaaaggtttcaagctgatatgaggcagcttttgactgtagttccagttcgtctttttgtgaggacaagctgatgttcccgatcatgatcgcaactacaatagagaaaatgacgaatattgtgataacgaccgacagaatgcggattgagatttcattggaaatctgttttcttttgtttttcataaccgtatgctcctttgcgtttttcttccattatatacctatgcaaacgaaaaacaacgaatttattgaaaataattataaataaagtaaataaacagaaatttttgctgataaaatggaaaaatatagtaaaaaaacgaacgctgttgcgcaaaaattgggcgtggatttatagaaaaatattttataaaagcacaaaaataatatgaataaaatgcaatataaagacaaagtgcatgcaaattctatgatttgtgtctattgcgcaagttatatgtggcatatataataacaatatgaacaaccggtttcgcaaagaaaaaaacgagaaatgttgttaaaactgggaaaatgaaatttctttcagagcataggaacaacagcgttgcgcaaacaagatgttgggggaggaaaaataatgaaaagtgggatggtaaagcgcatgctggcagcggcactggcagcgacattgattgtgacaagtgccgggacaacggatgtctgggcagcaggaagcgaagagacagtttctgtgagtgtggaagagacagaggaaagtacggagaatgtaaaaactgcaagcagcagtaatctgataacaaatggagattttgagacagatgcatctggatggacatttttgttgggtggtggcgattattcgccaaacttaaaaaaaggtacagacacaggtatgacaaataatacgacgggttatatcaacatttggtcggaaaacgaagccgagtttgttatgtctcaggagattacgggactttcagcaggaaattataccgctatgttaagtatagatggagcaaatgataaaactgcagatttaaagttttatgcgggagacgagagtacagtattaagtacggaaaatggctggaataactggtcgacgtttaaggttgaaaatatagtagtagatgaaagcggaagtattattattaaaattgcaggtacattaggtgccggatactggttcgatgtagatgacattacattaacaaaaaatctgtctgatggagaggaaaaaaccgaagcagcagaggctttaaatacccttatcacagcctgtgaagccctgacagagtcagattacacttcagatacctggagtgcattacagacagcgcttacatcagcaaaagcagtttatggggataaagacaacaaaaccgtagaggaattaacagaagctaaaacagtcctgcaggctgcaaaagatgcactggttgatgcaggcatcgttgataccggagctgatggtatttttgtacagaaagtagatggactgagcaatgattttatcaaaggtgtggatgtgtcatcttatgtcagcttaagagacagcggagtgacattcaaagactggaacggtaacgtgataggtgatcaggagttcttcagccagttaaaagaagcaggtgtcaactatgtgcgtatacgtgtgtggaatgatccatatgacagcaatggaaaaggatacggtggtggaaataacgatcttgcaaaagcaaagaaaatcggaaaatgggcaaccgacgcaggcatgaaggtgttaattgatttccattattctgatttctgggcagatccgggaaaacagaaggcaccgaaagcccgggcgggttatacgatcgatcagaaagtgacagctgtatctgattatacaacagcgagcattacagaactgttagatgcaggtgttgatgttggaatggttcaggttggaaatgagacaaacaacggtgtctgtggtgagagtacatgggaaaacatgtgcaggatctttgatgccggtgcagatgcggttcacgcagcaggagaggcaaaaggaaagaatatcttggttgctgttcattttgcaaatccggaaaaaagcgcaaactatgcaacttatgcaaaaaatctgaatacatatgatgtaagctatgatgtatttgcatcttcttattatccatactggcatggaacacttgacaatcttaccagtactttaaagaatatcgctgatacttatgacaaaaaagtaatggtagcagagacatcctgggcaacaagtttagaggatggcgatggacatgaaaatactgttcgtaaaggtaataatgatacaaaagtagatggtatggattatacattttccatacagggacaggcaaatgaagtaagaagtgttatttcagcgatcaacaatatcggtgacaatggtaagcaaactttcaaaaggcaagacttattatgtcaaagtgcgtgcctataagaaagattccacaggcgcaaaagtttatggaagtttcagcggtgcaaagaagataaagatcagtaagtagcccaaaaagtaaatttataatatatgtcatgtggtaaaaacatgatagaaagtggagaattttgttttttgcaggattctccacttttttaactcatgataatggatgtctgcagagagtgtgttctattatttgtccggtttttttctataaaaattcccctatttttaatatttgctcatgctaacataaatttgtaactgtcaaaaatatataaaaggaggagaacggggtttgaaacgaaattggaaagcaggggtatgcgtagctttatgcagtgctatggtttttaccgggataggaccggtgctgacaccatatcttgaaaatgcagttgtctatgcagatgaaaacgaaaattcaggggtaaaaaaagtttttactgcagatcagctgaaagtggcatggggagacgcggattatgaactcgcagatggacagtggaaattgtcttttgcaaaacagtataatcaggtgaaatggacgttgccggagagtatcgaaatgtcacaggtgaatgctgttacatttcaggtggcggatcagaaagtaccgatcagtctgaaagtatacaacggtggagatgatgcaacagcagctaatacacagtacggattaagcggacagacggagtatacgataaatccatcgggggatggcactattgatgcagtcggaatcatgataacggaagataaaccggaaaatgcaacggtaagtcttgtgagcgtgacctttgaactgaaagcaggagcgggcgatgcaaaactgggggataatattataaaaaacggtgattttgcagcgtccgaagcggcggagtcatggaacagtgcagccggagaatcggttgtttcagttgcagcagaggaagaagaaatcgcagattccggtcttaaaacatacggtgtacttacacgtaatcaggaaactgccacccctggggattgtttttcgcaggatatcacggatgcggttgaaaaaggggaaacatacaaattctcattctgggcgaaattgtccgatgattacaaagatgctccggaagagcagagaaatgtggagtttgcaccattctatgtttccggtggtgaggcaacatatcttggaagttattcagcaggtattttgtcaggagactgtacaaagacattaaaagctggagaatggacaaaatatgagggaactttcaaaataccgaaagctgcagatcaggtggtcatccgtattatagaacagggaaccaactatggacagggcgattgcgtaaaagggacttactatgtgaccggtgtgtccatgaataagattgaaagagaaaagccatctattgagaaggacatcccggactggaaagaaagtgtgaaagctgctttaggcaatgatgtagttgcaggcacagcagtgaccggtgatgagatcaatgatgatacgctgatggaactggtggaaaaacactttaatgcggttacacttggaaacgaattaaaaccggatgcattgttcaactatcagttagaggataaagtcaacacaaagacgatccaatttaaaggacaggatcttgaagtcccggtcgtaaatgaagccggtgacagcttggacttttcacgtgcagataaattaataaataaaatctgtgagtggaataatgaaaatccggataacaaaatccgtatccgtggtcatgtccttgtatggcattcccagacacaggaatggtttttccatgaaaattatgataaaaccaaaccttatgtggacaaagagaccatgaaccgccgtcttgaatggtttatttcaagtgtctttgaccattacttcggggaaactgcaaatggaaaatatgacggattattttatggctgggatgttgtaaatgaggctgtcattggaaactcttaccgtacagataccgtgagtgcagcggaaagtctcgatgagatccgtcatggaaataattcaagctggtggcatgtatataagagcaacgaatttatcatcaatgccttcagatatgcaaaccagtatgcaccgaaaaatgtagagctttattacaacgattttggtgagacggataatgcaaaatgtgagggtattgtaaaactcatcaatgatgtaaaggctgccgatggaaccagactggatgcatttggcatgcaggcacattacagtgtggatagtttttctgccacgcagtttaaaacagtggctgaaaaatatgcaaaagctgcaggaaaagtacagcttacagagcttgattttaaatcaagtgcatcttatacatcaggtatggcaacaaaagagagcgagtatactaaaattgcatattgccataaacagttattcgatgcgatcaaaggcttaaaagcagatggttcgaacgtttccggattgaccgtatggggggtcatcgagccaaattcatggttacatgaacagtctggtgttggtggtggtgcagacggctctgcgcagtgcccattgctttttgatggaaattataaagcaaaacctgcgtactgggcgtatgtagatgcatccagactccagccgtcaattcaggatgtagttgctgcagagaaaaaaggtgatgcagtgacaggaaagacatacagtatcatgcagaatgatatcacggcttcctttatttcgatgtgggataaagatggtcttaccgtgcaggttacggtagaagatgccgtaaaagatgataatgatgcagttgctgtttatgtggattctgcaaattccggaaaagatgacatcacaccagtgaccgtaacggtaaaaagaagcgaggcagcagaagtagaaaatggttatcaggcaaccataaaggtaccgttatcaggactttccgttgcaaaagtgatcggaatggatgttgtggtcacaaatggggataaaacagccgcatttaatgatttgacaggaaaacagggaacaagcagtaaatattacgcgaaagtaacgatgaaaccaggggtggagaaagctgcctatggtacagttaccgtagacggagataaagatgcggtatgggataatgccggaaccattccgattacaatcaatctcggctccaatgtttctgcaaatgcgaagttactctgggataaagacaatttttatgtatatgccgagatcaaagatcctgtcctcaataataccaacggtgatgcatgggagcaggattccttagaagtatttatcgacgaaaataatggaaaatccaactcttatgaagacgatgacaagcagtacaggatcagttatgcaaatgatcactcatttaatggcaaaaagtgccttgaagagaatatgaagtctgtggcaaaaataacttctgacggatatgttgttgaagcgtcatttaaatggacggatatcacaccaaaagccggagatgagatcggacttgaatttcagatcaatgatgctgatgcaagtggcaaaagaattggtacattgagctggaacgatgaaacaggaatgggatggtctaaaccggaagtatttggtactgtaaaacttggagaaattaaaaatgctccggagaaagatacagaaaagaaaccggaaacagagaagaaagaagtaaaagttaaaaaaatcacgttaaataaaacaaaagccggaatgaaaaaaggtgcaacgcttacattaaaggctgttgtttcaccatctgatgcagatattaaagacgttaagtggacatcttccaacaaaaaagttgcgactgttgataagcatgggaaagtaaaagcattgaaaaatggtgtgaccacgatcacagcaacggcaaaagatggaagcagagtaagcgcgtcctgtaagatcacggtaggttataaaattacctataagttaggaaaaggtaaaaacagcagcaaaaacccggaatattattacaatgaaaaggtaaatttaaaatctgcttccaaaaagggatatgtctttaagggctggtatacagacagcaagtatacaaagagaattaaaacaatctcaaagagcagcaaaaagaatcttactttatatgcgaaatggcagaaagtgaccgtaaagaaatctgcaattaagaaaatgaaagctgtttcgggaagaaaagcaaaagttacagtccagaaagtggaaggtgcagccggatatcagatcgtttattctacggataagcaattcaaaaagaatgtaaagaaagtaacaatatcaggcacatcaaaaacacttggaaaattggcaaaaggcaagacatattatgtaaaagtacgtgcttataagaaagattccacaggagcaaaagtttatggaagtttcagcagtgcaaagaagataaagatcagtaagtagttcccaaataaatttaatatacccgccatacagtaagatgtgtggcacaccggaaagaggattttgcaactaagttgtgaggtcctctttttgctttgcatgataggtgtgtgtttttccagtaccataaacaggaatcggaattgataaaatttgaaatgtcaaccgattaacataaaacacaaggcttcaatagtcctttctgcccataaatgattaaaaatgcaaaatatatgttgtgaatatgtacaaaaatagaagcgattatttgattataactgacaaatcgtatgtcaaccgattgacatacggagaaggctgtgttaaagtaagggcacagtaaggacagcaatgacggacagaaaaagaattagtaagtttgggaacgggaacctatcatatttttagagaaaaaagagtggaggagaaacaatgaaagcaaaaaaagtagtagcagtattcatgacagcagcaatgacaatggggatgttagcaggctgtggcagcaacagcaattccggcagcgcaaatacaggcagtaacgcaggaagcaacgcagcggacagcagcgatgccagtgagagtacagcagccggaactgagagcacagggaatatcgacaccgcagatttagcaggaacacagatcacgatgttaaacagtaaaggtgaaatccagacagcacttgaagatatggcagaggcatttaaagaagatacaggaatcgagcttgaagttcaggcatgcggaaccggcgaatctccatatacaagagttacaagcgcatacaactcaggaacggcaccgacgatggcgatcttagataccactgacgttgttgcacttgcttcccagtatgcagttgatctctccgatgaagagtgggtaaaagagtgtgtaaaccagaccacacaggttgacggaaagatatacagcttcccattctgtgttgaaggacgtggaatcatttacaataaatcagcgatcgaggatactttaggagaagagtttgatccatccaccatcaattcctacgatgcattaaaggaactgcttgaaaaccttcgtgcaggcggcatggagaatccggtcgttatctcaaaagaagactggtctttaggtgcacatcaactcggatttatctatgattcctacgatggaaccacagagggaagtgccaaagtcatcgacgagttaaaagcaggcacattaaaggcagaagattatgacagattcaacgagttcatggatacttttgatttattaagccagtataacatcaacggagaggatcctttaggtgctctttatgatcaggatccgatcttcttagctgacggtgatgccgctctctggatcaatggatgctgggcttggccaaacttaaaagaggcaggcgcttccgacagtgatgagtatggattccttccatatattttaggaaatgatacttctgattttgcaaacaacggtattcaggcaagcgcaagcaaacagttaatgatcgatgcagagcagtccacaccggagcagcaggaggcggcaaaggcatttgtcaactggctggtatactctgacaacggacagaaaatgttagtagaagacgcagcagtgatcccggcatgcaaaaacaatacttatgaagcattagatccgcttggaaaagacattcaggcaaaaatggcagcaggcaacacctattcatccagctttatcgcaccttctgaccactggagcgtacttggagcttccatgcagaaatatcttggcggacagtgtacaagagatgatcttgcagcagacatcgacaactactggacatcacagaattaatcgtatctaaagaatagaaacaaaaacatctgagtgtgaccgtacggatcacagccatatatcatctctgcgggaatgccatctgaaaaagcatgatggcagtttccgtggggatatcagaaaggaattagggttatgggtagaaaaacgggagaaaaaattaaaaatctatgtatctttgcactgccgggatgtctgattttctgtgcagttgttatactgcctttcctgtatggtttttacctgacactgaccgattgggatggagtcagcaaagtaaaaaatattatcggcgtgcagaattatatttccgtatttaaagatacggcattctggtcctctatgggactcactttaaaatatgtacttttatcggtaatcttagtcaatgcagtggcattccttttagcatatgcactgacaaacggaatcaaaggccagaaatttttccgtgccggtttctttacaccgaatttgatcggtggtgtcgtacttggatttatctggcagttcgtattttcaagagtgcttgtgaacatgggaaagagcacaggctggggattattttccacttcctggttagcagatccgaataaagcattctggtccatggtgatcgttacagtttggcaattatccggttatatgatgttgatttacatcgccggtttcacagggctgtccacagatgtgcttgaggcagccagcatagatggggcaactggtctccagaaaatgaagagcattatcttaccgctgatggtgccgtcgtttgttatctgtctgttccttaccttatcaagagcgttcatggtttatgatgtaaaccttacattgacaggcggtgagccttacggttccaccagactggttgcgatgcatgtctatgaaaaggcattcacgtccagaaattatggtgtaggccaggctgaagcactgatcttatttattattgttgcatgtatcagcggtgcgcagatctatatcggaaagaagaaggaggtagaggcataatgagcagaaattcaaaagtaggcggaacaaaacgccgtgtattggatgttgttggatttacagcgatcattgttttattcctgctttatatggtaccgttcattctggtgctgttaaactcctttaaacagaaacgtgatatcatcaagaatccattttcccttatcacagaaaagggatatacacttgcaaactacacaaaagcatttgagaaaatggaattcataaaagcgtttggaaactccctgtttatcactgggttaagcacattgctcgtcatcatttttgcatccatggtggcatattattttacccgtgcaaaaaatacattttccagagtattctttgcactgatggcagcatccatgatcattccattccaggcgatcatgatcccgttagtttccatttatggttccgggcttcatttgttaaaccacagactgacactgatctttatgcatacaggttttgcgttgagtatgtcagtattcatttatcagggatttatcaagagcggtatcccaatctcactcgaagaggcagcttatctggatggatgtaccaatgtacagacatttttcaaggtcgtatttccgctgttgaaaccgaccacggcaacccttgtgatcttaaacgtactggcattctggaacgactatctgcttccgtcactggtacttggaaagaaaaacttatatacacttccgttatcgacttattctttctacggaacttactcatccgattacggtgtgatcatggcagcactggtacttaccgttgccccgattctggtattatatttgttcctgcagaaagagatcatcgatggcgtggtagccggcgcggtgaaatcataaaagagtattattcctgtgaagtgacagcagtgaaatggtggtgagcataaaaacaggattttatgcagaaatggagattgatatgaaaaagttggaaaacaaatgtatgctgattacttattcggattcgatgggacataatctggcagatttaaacgagattttagataaatattttaaaaaagcagtgggagggatccatatccttccgttcttcccttcttcgggagacaggggatttgcaccgatggattaccacaaagtcgatccggcatttggtgactggaacgacgtggaacatctggcagaaaagtattacctgatgtttgattatatgatcaatcatatttcggcacagagcccgtattacaaagactttctggagaaaaaagatgcatctgagtatcatgacctgttcatccgctacaaagatttctgggaaaacggggagccgaccgaggagcaggtggatgcaatctacaaaagaaagccgcgtgcaccgtatgtggaggcacattttgcagacggaacatctgaaaaagtatggtgcacgtttgatgaagagcagatcgatatcaactgtaaatctgagacggcaaagcgttttatccgcgacaacttaacaacattgtgtgagcatggtgctgcaatgatccgtctcgacgcatttgcctatgcaacaaaaaaagccggaacaagctgctttttcattgagccggatgtatgggagttcttaaaagagtgtgaggatatcgtaaaaccttacggagttacacttttaccggaaattcatgagcattacacgatgcaggagaagatcgcaaaagaagattactatgtatacgattttgcacttccaatgctgctcattaatgcattatactatggacagacacagtatttaaaacactggtttgagatctgcccgcgcaaacagttcacaacacttgatacgcatgacggaatcggtgtggtagatgtcaaagatttgctgccggatgaggaaatcgggcgcaccaaggaggatatctttaagtttggtgcaaatgtcaagaaaatctataataccgcagcgtacaataaccttgacatttatcaggtcaactgttcttattattccgcacttggtgatgaggatgatgcgtatctgttagcgagagcggttcagttttttgcaccgggtattccgcaggtttactatgtcggactgctggcaggaaagaatgacttaaaacttttggaagagacgaaagtgggacggaacatcaaccgtcattattatacaaaagaagagatcgatgcggaagtaaaacgtccggtcgtggcagaacttctgcgcatgatggaatttcgtaatgctcacccggcattcgacggaacatttgaactggaaacctgtgacgatgataagcttgtgatcgtgcgaagaaacggtgatgcgtgggcaaaactttccgctgactttaaggtgaagaagtttacgatcacttatacagaagacggagaagttcacacgttttgaagataattgcacaatagggtgtcaatgttattagtagtacgaataagaaaaatgcaagaatatgttaaccaatgcaagataagttatgtgcgtacaagcattataaagaaaaaataagttatgtgtgtacaagtgctggttaaaaaggaaaaatataagtaggaggttgtaagacatggaaaaggaaatatacatcaaaaaagggtggctgtttattccggtctgtgccacgtatggcgagctgccgtttggcggcaaaaaaaacaaccgtatgcttgagatattctgccgggagaataacagcgaaacaaagctgtttgagtttcagatcccggcgggagaggcagaggatgaaacataccctgtcagttattatgcccgttttccggtaaagcaatttaccgacaaaacactaattctaagaggggatcttgggaaagctttctttgacggaatcagaaacgaggacgtacctgaaacggaagaaaaatctctccgtgctacgcagggtgaggctttccgccgcccttcgatccattttacaccgcagaccggatggatgaatgatccgaatggtcttgtgtatgcagatggcgtgtatcatttatatttccaacataacccattcgatgtacagtgggaaaatatgagctggggacatgccgtgagcaaagatttgctgcactgggaacagaaggatgacgtgcttttcccggatgagaccggaacgatgttttccggaagcggcattgtaaacgatcgtaagatgcttggactgccggaagatgcgctggtatttttctatacggcagccggaaataataataaatggagcgcagggaaacagtttacccagcgcattgcatacagcacggatggaggggagacactccataaaattgacaaaagtgtgcttccgacggtttgtaaagaaaaccgtgatccgaaggtgttctggcatgaaaaaagcggtgcctatatcatgacactgtggttagaggaaaatgattttggcatttttcgttccaccgatctgctaaactgggaacagaccgaccgcctgacattcaaggaggcgtgggaatgtccggatctggtatgcctgaaagatgaaaaaggaaatgagacctggatgttctggagcgcagacggtttttacttctggggagagtttgatggatatcaatttcagaccgacggtgtgcgtcatgcggcatacatcaacaagatagcttatgcggcgcagacttacagcaatacaggaaatcgtgtgatctcagttccgtggctcagatttccaaaccggggaaggaattataccggggcgatgggactgccgagggagttttccgttgcatataagaacggtgaaaaagtgctcaggcaggaaccggtcagggagtatgaggacagcaggaaacctgtgtatgacaatacaatgaaaaatgtccggcagcaggatactgaaaatgaggcaccgatggcagacaccgcagcaaaagttgcagatgaacatgtgtcagcaaaggatttatttcagtggaaatttgcaccggacacagcaacggaaattcagattacccgcgcagagtcagaggacattttaagtgcctgcatcaaccagaagactgactttgtatacaatgcaaaaaccggagagttaaaaatcggtgaagaaacatttgcaacaggtgtcggaatccgtgatttttctctgctttttgatgatgtgattcttgaagtgactgcagattgtggtacaatcacaggtatatttgaactgcctgaaattgcagaaaaattttgcatggaaaagggcagcatagagaagatacaggttttcggggaggaagtatggcaaccttaaaggatgtggcaaaggagacagggcttaccgtaagcactgtttcccgtgtgctgaataaccgtggatatatcagcgaagaaacgagaaaaaaagtatatgaggcgatgaagaagctcaattaccgcccgaacgaagtagcgcgttcgctttccaaacagacgacgaacacgatcggtgtgatcgtgccgcacatcagacatccgtattttgcggagctgatcagtaatttggagagtcaggcgtatcattatgaccataagattttactgtttaactcccaggagaaaaatgaaaaagaatgggagtacatggaaatgtgcacgagcaaccgcgtggcgggagtcattctctgcagtggaacggtcggcgtggaaaagtttaccggattaaatgtgccgctgatcacgattgagcgttatcttgaaaatggaacagcggaggtggagtgtgacaatgagcagggcggacgtcttgcagcgcagcatctgattgactgcggatgtaaacatctgatccacatcagcggtgtccatgaaactgccatgcctgcggatgcgcgtgcagttggtttccgtgcagtctgtgaaaaacagaaggtttcttaccagatcgcagataccacggcctttgaatataatcatctcgaataccatcagattctcgaaaaactgctaaaggaaaacccggatacagacggaatttttgccagcagtgatctgatcgcagcgcagcttcttcaggtgtgccataatttgaacattgatgtgccgtcgcagatgaagatcgtgggtttcgatgatgtcaatattgcatcattaacaacgccgccgatcacgacgatccatcagccgatcaaagagatggcaaaaatggcggtggaactgctcgtccgttccggcaatggggaacttgtgccgaaccgcactactctgccggtatcacttgtagtaagggagacgacttaattcaatatgtatatgagccaggtatatagcaggaaggtaaatagtgcatgcgcaaaaccggcgcaggaatggaggattcctatggaagaaaaaaaatggtggaaagaagcggtagtctaccagatctatccgcgcagctttatggacagcaatggtgatggtgtcggcgatcttcgcggcattaagagccggctgtcttatttaaaattattgggaattgacgtgatctggttatccccggtctatcagtctccgaacgatgacaacggttacgatatcagtgattacagagatatcatgacggagtttggtacactcgaagattttgatgaaatgcttgccgaggcacacaaacttggcattaagatcgtcatggatctggtcgtcaaccacagttccgatgagcaccggtggtttgtggagagcagaaaaagtaaggataacccgtaccgcgattattatatctggcgtgaggcaaaggacggaaaagaaccgaataactggggttcctgttttggtggatccgcatgggagtacgatcagacaacggatatgtattatcttcacatgttttccaaaaaacagcc

SEQ ID NO: 5181 - DNA, 7082 bp, Unknown
  gut microbiota DNA sequence
gtttatttaaaggttcgtgacatatttgctacatctgttgattatgatccacattgtgaacaggcagatctttttttcaaaaccgttcagaataaacttcattattccgttcatgggcatactgcaccagaactaattgttgaacgtgctgatgcttccaaaaaaaatatgggtcttacttcattcaaaggtgcgaaagtaaggaaatctgatataaccattgccaaaaactatttaactcaggaagaacttgaaaatttaaacagaattgtcaccatgtatcttgattatgcagaagatcaggctaaacgtcatattccaatgtatatgaacgattgggaaaaccgcttagatgcattcttacagtttactggcagaagtgttttagataatgccggacatatttccagagaagctgccgataaatttgtcaatgaacagtatgccatttttgatcataaccgtcattgtctagaatctgaagattccatggaattggatgcattacctattcttccaaaaaaataagcggatcacaccgatatgtgctagaattatttttgaagagtttatgttattgaaacaggagatacacactatgccattaccaaaagaaaacacttacacgaccgattacatctattcacttccagaaggacagcgtgcagagctgatcgacggtgtcatttatgacatggcaccaccaaacagattgcatcagaaaatccagcaggctcttgcatggagcattgagacatatattcgcaaaaataacggttcctgtgaagtctatcctgccccatttgccgtttttttgaataaagacgataaaacatacgtcgaaccggatatcagcattattagtgacaaatcaaagctggatgaccgcggatgcagcggtgcaccggactgggtcatcgagattgcatctctaagtacgaaacgaactgattatggcgtgaagttattcaaataccgttctgcaggagtccgtgaatactggattgtaaatccacttaccaaaacagtgaacgtctatgatttggaaaaagaagagctgtgcgatcaatatagttttgatgatgatatacaggtgtgcatttacgataacctgatgataaatattgcagaattgctgaaataaataaaaaccgcccctgcgaaccggacaccagccaacaacaggagcggatgcgtgctctgaagatacacgccctgaacaagcacattgtatcattcggagtagccaaacgcaagcggaacaccagttctctgctggctgttatttttataccccaaaatagaaaggaatgatacatatgaaaatcgaaaaactcccaagcggctcttaccggatcagaaaaatgtacaaagggcaaatgtacacagttgtgtttaatgagaaaccaacacagaaagaagctatgcaggctatggctgcagaaccggataaaataaaaagtaaaaaataccatctaacattcacagaagctgcccagcaatacacagaaaccaaagaacatgtgctcagtcctaagaccgtaaaagaataccttgaaatacccagcagactcacagacgattttacaaataaacctatatacgatattacgcaaatcgatattcaaaaagaaatcaatatcctggcaaaaacgcttgcgcctaagacaattcgtaattaccatggctttatatcatccgttttgggaatgtttcgaccggaaatgaatatttccacaaccctgccccaaaaaatcaaaaatgagccgtatatccccactgatgaggatataaaacgattattacaggctgcgcagggcagcatgtttgagattcctatcaaactcgcctgttatggtttacgtcgttcagaaatatgctctctgaccatagatgatctaaacggaaacacgctcgcgattgattctgccaaagtgctggataaaaataatcaatgggtggaaaagcagacaaagacaactgcaagtacccgcgagattgtcatatccccccaattagccgatttaatccgtgaacatggatatatttataaagggcatccaaattcaattaccaagcacatgaacaggttacaggacgaattaaatatgccccatttctcactccacaaactccgtcactattttgcgtcctacatgtcatctttaaatattccagaagcagatattcttgagatgggcggatgggaaacagattatgttatgaaaaatgtataccgccatactatgaaagataaattaaaaacctctcaggacaaagcatccaatgcattgtcaaagatattattttagaatttgtcatgacaaattccatgacaaaaaaagatataaatatgacaaattttaaataaacagaccagatattttagagcaaaacaatagccgaaaagccttgattttacaataaaatctcgactttccggctattttacaccaatcggggtaacaggatttgaacctgcgacctcacggcccccagccgtgcgcgctaccaaactacgccataccccgtagacaaggaacatctttatcgtagatgatataaacttgtcagaatccactataccatatgtatatgcttttttaaaggtaagaatgcattttgtattttttttattatttttatgttttttttattttctggtagaaaaaaggttcagattgtgttaagatttaaccttgcaaaaaaactatttattgacatttttttgcaatcaacaaataatgatatggatttatatatcatagaatttggaggctgattttatgaaaaagttatttgctctttgtggaagcattgcaactatgctgcttctcacaccgctgacgattctcgcagcagaatccggcgaaagcagtactgcaacagttccgatatggctttgtatcccatttgccggtctgttactctgtatcgcagtacttccgcttgtaaaaccggaatggtgggagaaaaaccagccgcttgccgtagccgtatggtccctgttatttatcattccgtttgcagtgacctatagtgccggagatgcggtcgaaacagtacttgagtgtattttaaacgattacctgacttttatcgtcctgttatttggtctgttctgtgttgccggtaacatcactttagaaggcgatctcgcaggttccccgcgcgtcaacgtaatcttccttgcgatcggtaccttactttccagctgtatcggtacaaccggtgccagtatgttaatggtacgtccgatgatcaagatgaactcctggcgtcagcacaagagtcacattatggtattttttatcttcctgatctcgaatatgggaggatgcttaaccccgatcggtgatccgccacttttaatgggatttatgcgtggtgttccgttcttctggagcatgcatctgttcccgattttaatctttaatatggtgattttactgacggtattctatctcttagaccgtcacaattaccgcaaagatattgcaaacggcagaaaaccggatatcagcaaagccggtaccacattaaagatcgatggtctgcacaacattattttccttattatgatcgttgctgctgttattttaagtggaactcttccgaaccttgcagcatttcaggatgcagccggaaacgttcgcggtatccgtgtattccgtgaggtgacacttggttttccttctattattgaggttgccatcatcctgcttgccgctttattatcttttaaaacaacagactctcagatccgtaccagtaaccactttacctggggtgcgatcaaagaagttgccgttcttttcatcggtatctttattaccatgcagccggcactgatgcttcttaaatccacgggaccggagcttggtctttccaaaccgcttgagatgttctgggcaaccggtgcactttccagtttccttgataacacaccgacctatctggtattcctgacaactgcaggtacacttggtttcacacagggtattgcaaccacggtcggaacgattccggtcaaaatgcttaccgcgatttcctgtggtgccgtattcatgggtgcaaacacttatatcggaaatgcaccaaactttatggtaaaatccatctctgacgaaaacggtgtgcgcatgccatctttcttcggatacttattatggtcaatcgtatctttagttccggtgtttatcattgacactctggtattctttttataaaggggggatttcacaatggaaaataatatcgaaacatcacgggcacttgctacccgcatttatgatctcgacagtgaagtttaccgtctggtaggttcttcccttggacgcacttttaccggcgacaaagaaacaagtattcgtaacctgacaaccttgatctctacacatccacagggacatctgctccgcagtgagatcgctttaatcggtaatatggcgcgtacgatccgtaacaaagaggatcgcagccgtatgatgcacgagtacaatgagattttacatcagatcgcagaactgccggaaagttttggttcggttgatatccttgaccagaaccttgcttccttaaatacatccaacctgcaccagaagttttccaaagacgatcatctgatcatctgcatcggaagaacacacggaagcgccggtacggatattggtttcgcgcttgcggatgcattaaagatcaactactacgatgttgaaattttcaaccgtgtattagagcgtttagaggcagaaaaagattccgtcacagaccgtgacagctttacatcaaaacttgatcaggttgcaaaacatgataccagtgcaaaacgtttcttaaaagatttcagccgttatcacggcctgccgaagaaagatgccgtatttttcaaccagagcgatctgatcgtggaaatggcaaaaaaagaagactttatcgtaatgggccgctgtgcggatgtgattctgacaaacaaccgtatcccgcacatcagtatcttcatcaccgctccgtttgaacagcgtgtgcgccgtatgatggaggtaaacaatcttccactcaaggaagccgtccgccgtttgaaaaagattgataaaggacatgagcagtactatcatttttataccggacgtaaatggggagatgccgtaaactatgatctttgtatcaacagtgcatgctacggtatcgaagaatccgtagaactgattgagcgtatgatcgatatccatccggagaagtagatcacatgctaaagaggcatattgcagaaaccagctgggctggctgcaatatgcctcttttttatgtttatgtatatttttcttttattttacatataatttataattgtgcaacaactatatggttttccactattatgcactcttatccacattatccacagagttatccacattttttctgatagtttgtgtattgtttgtatattgtctaacattttacattcatctgtcatttcatgtttttgctgttccagtgttttcctataccacccgcttattcagccactttccccgcttataccgtattacaaataagagtgagcggaacacccagtccacatacattccgatccacacgccaagcacgcccattttcaacgttcctgcaaagaaatagctgcttgcaacacggaatacccacatggaaaacacgctgacttccatggtatatttcgcatcccccgctgcacgcaaaacgttcggaagagcaaaactgagcggccagataagcatagcacagatgaaaaatgtctgtaaaagctgtaccgtaattgcaaacgcctcaccggacagtgaaaaacacccaaccatcggacggaccagaatcaataacgttatgtcggtcaaacacatacctccatatgcaagccctaacagttttctgctgtaccatttcgcctgctctttttccccggcaccaatgcagcgtccgatcactgtcaccatcgcaagcccgatcgcaatccccggaatattggcaaacccggcaatactgtttgccacggcatttgcggcgatcgcagccgttccaaacgttgccgtcaggcttgacaccagaagtttaccgatctgaaacatcccattttcaataccgcttggaataccgatctttaagatttttccgatcacatctttctgtggacgcatacagcccggtgtcgcgatgcagagcggattatcttttttcgataataacacgaccatgacaagtgcagacaccattcttgcgatcagtgtcgcaagcgctgctcccattacaccgattccagcaccataaatcaggatcgcattgccgccaatgttaatcacattcatgacaaggctggtgtacatactgatcttactgtttccaatacttcggaaaagtgccgccccggcgttatacacaccgagaaacggataggatatcgccgagatcaaaaaataaatctgagccgcatccatcacatctgcttcaatctgtccgaaaattgtacgcaataaaaaacgatgtaaaaataataccagaatcattactgttccggatgatgtgagcatgataaacatcagctgtcccgcagaaagttttgctttctccggcatctttttgccgagatactggctgcacacaacggccccgcctgtcgcaagtgccgacagtatctgaatcaataacacactgatgctgtctacgagtgatacaccggaaacagaagcctctccacaggaagacaccatcagggtatcaaacagaccgatgcttaaagccagcatctgctctatgatcagcggtatgatcagttttttcaaatcctctcttgtaaaaatcggttgttccatattaatcctcatttctgcacagtctttttgtatcacaaatttgagcataagtacattcctgcacagtctttctgtataacaaatttgaacataagcacattcctacatgtagaaaattcaatttttcacatgtgtttccacaatcgagtaggagggaaatctgagtgatttcccgacctctcacaccaccgtgcgtaccgttcggtacacggcggttcaatcaacttaacaagtaac

SEQ ID NO: 5182 - DNA, 10468 bp, Unknown
  gut microbiota DNA sequence
aggttcactttacccacttttacatacgttagaggcaaataatctggtcactgcctacgaggatgacgcaagcggaaaaacacgcaaatattaccacattaccagagaaggcagacgcattttaaaagagaaaaaagaagagtggaacacttatgccgcagcagtcaccaatgtgctctcctgcaggggagcggaggcgtgtgtctgaaaaccagagaaaactgtatttggattatataaaaatattggaataacacagaaagatattgaggcagcaagatgttggaatgatgcataaaaatattggggcaataaaattttggagcaacgcaggaaaatgttcaaaaaatacataaaaaatacgagaacaaacgaaatgcgaaaaaagggaaaggaaacatattcatggaatacacagaatatatggaaactctgaaagagcagatccagaataaacgtgcaagatcgcttgtggcagaagagatccggggacacatcgaggaacaggcaaaagagtatcaggcggagggcatgagtaaagaggatgcagagagagaggccgtgcggcagatgggcgatccggtggagaccggctgtgccttaaaccggatccacagaccggcgtttccgtggaaattatttgtgctggcggtatttctgaccggggcatccatgctgatatcactgactattgatgcgaaaatcaatgagggcggagtacaggcggcgcaggtcggttcgctgtttatggtcaatgcagtcagttttgcaatgatctttgtgatcatgtacttcgattacacatggctgtttttacatatccgtgcggtatatgctttgtatatgatctgcctgtgtctggtgtggtcgggtggcatccttggaaactatcagacagcgctgctggcaagttacagtgtacaggtgctgctgccagtgatctttgcgggaattatttatcagtaccggggacagggatttcggggaattttaaaatcagccggctggatcattatcccgtttatggtattagcagcagggctcatttcactgccgaagagtaatggggcggttgtggaaaatgccgtggtctgtctgttcctgctggtggcatctgtgcttcgtggaatatttggaaacgaaaagaaaaaataccttgtagagctggcattgcttgtggctggtattctgggggttggtgtggcttttttttataagtatacgttcctgccaggcggctatgtgctcgccaggcttacgcatacaggtgaatttggatatcagaacagaatgataaaagatgcggttgctcgatacagcctgtttggaaaccggacatttctgatgcaggggacaggatcggacggcgaatatttgctgggaaatatattttgttattttgggatcatagcaggtgttcttgtcgttgcagcatttgtgtggtttttgatccatgcgctgcgtcagtctctactacagggcaaccggatgggctttcttttggggacggcgtgcagtatcgggttgatcgtgcgtgtgatggtaatttatattatggtaaattttggatatggcgtaatttatacagtggcagttccgtttttttccacaaatgtgatcttagcggcagtcaacgggatttacgttgggttgctattttgcgtgctgcggaataaaatgatattaaaagaaccgcgcagcgaaaagaaaaatgcgacggtttaaagatcagaaagaaagggtatatccgacatgaattacatcgatatgcattgcgatacgttagcgaaggcagccgcacagcaaaaaaagacggcaggggaactaagaaacacgatggtggatgcgaaaagactgcaccagtgtggcgcaaaggcacagttttttgccatgtttttacagcagaaaagagaagaaaactggagtgatccgggactggcatatacggaaaaaaataatctctggtataccgatgcagagatccggaaacagatgcaggatatgtacgaagtataccaaaataccatggaaacctgttcggacattattgcaccggcttataactacgaaggattacagtgcaactggcggcagggaaaagtttctgcctttctgactgttgaaaacggatgtattgtggatggaaaaatggaacggatcgataagctttatcagatgggagtccggctgattacgctgacctggaatgatgataactgtttcggtcatccgcatgcaaaagaggcagaacggatgcagcttggactgacaccgtttggcaggaaagctgttacatatatggcagagcgtggaatccttgtggatgtgtcccatttgtccgatggtggtttttatgatgtggcagaacttgtgaggggcccgtttgtggcatcacactcaaactgcagggaacttgctcctgcaacgagaaatctgacggatgatatgatacgggtattagcggaacatggtggtgtggcggggcttaatttttatccaccgtttttaaatacagatcctgtggataaagtgagccggatcgaaacaatgtgtgaacatgtaaagcgtctggtcaatgttggcgggattgagtgtgtcggaatcgggacggattttgatgggattgagggaaaatttgagatcgctgactgcacggatatgaaaaaattatttgatgcactgcagaaaacagggttcagtgaggatgcactcgaaaagatcgcatacaaaaatgtggagcgtgtgatccgtgaagtgatgtgagaaaatgtaaagatgttgacaccaaatagtgcatacaaacttcaacatcttgtaatgaaataacaaaccggaatatccagggaaaactgatatggatattccgattttttaattcacgacaatagaatgttcatagagcgtgcattctatcggttcatctccgaatgataccccgtatttttgtgttctgcaataatactgtcgatctcctcaaggtcggtcgtgatcatatctccgatgacactgtgcttgatcgctgccatggcatttccatattctaatgcttttctgcagtccttgtgttttaagtagccgtagagagcaccggaaacataggcgtcaccgcttccgatacggtcgaccacatcaatgttgttgtatggttcctcgcggtagtaagaatcattttttgcagaatagataatggaagtaaaattgtgtttctttggagtgatgaccgtgcgctctgtggaggcaaccacagagataggatattcctcgcagaaagacttctggatttcctcgatcgtgcctgttttgccgaaagtcaggcgtgcggtatcttcggagcagaagaagatatctacataaggaagaatctgctcgatgcaggctcttgcctcctcgccggtccagagattggcacggtagttgacatcaaaagagatcagggttccctgctctttgaatttgcggatacattcgatcgcaaatttctgtgcgttgccgccaagacctaaggtgatcccactggtgtggaacaggcgtgtgttataaaacatggtttccggcacatctttgatgtcgatgttattgatggaagaatgtttcctgtcgtagacgacacgcggtttgcgcggataggaaccatattcgtaatagtaaacaccgatgcggctgtcatctgctgtgtcggagatcaggtaattttcactgacgcgggaagcgttcatctggtttttgatgaatgcggcgagcagattgttaggaatcttagagatcattgctgtctttaagccgagttgtccgatctcggaagcgatatttaactcggcacctcctaaatgtttcattaaagtatcgccctgtgcaagacgtccgttgatcggggtggaaagacgaagcagaatctctcctaatgtgatgacatcatatttgcggtccatggaaaatcctccttaaaaatagatagtgtgatatatatgtatgcctgatttacggcaaaacattttggaaaacataaatcagtgttatcatatccaatagtttcatattacaaaaccaagttctatattatgaaccaatacatatgtattatataacatatttcaaaaataaaaaagagataattgcaaatatttcacaatttttttgaacaaaaataacagaacctataaaaattgcattaaagtaaaaacatgtttgacattctgtttttcggtgttataataaaaatataaattttgaaacgcagtttcacaatgtgaaacattatttttaggaggattaaaatcatggcaaagaaagttgttacatttggtgagatcatgcttcgtcttgcaccggaaggatattatcgttttgtacaggctacatcctacggcgcaacatacggcggaggagaggctaacgttgcagtttccttagcaaactatggtatggatgcaagctttgttacaaagcttccggcacatgagatcggacaggctggagtgaatgcattaagacagtatggtgttgacacatctgacatcgttcgcggtggtgaccgtgttggtatctacttcttagagaagggcgcaagccagagaccatccaaagttgtatatgaccgtgcaggttcttccattgcaacagctacaacagctgattttgactgggataaaattttcgacggtgcagactggttccactttaccggaattacaccggcacttggcgataatgtggcagcaatctgcttagaggcatgtaaagctgcaaaagcaaaaggaatcactgtaagctgcgacttaaactaccgtaataaattatggtccaaagaaaaagcaggccaggttatgggtgaactttgcaaatatgtagacgtatgtatctccaacgaggaagatgcaaacgacgtattcggtatcaagtctgaaggtacagaggtaactgcaggcgagttaaataaagaaggatacaaagaggttgcacagaaattaacagaccgtttcggattcaagaaagttgcaatcacattaagaacatctatctctgcaaatgataaccgttgggcagcaatgctttacgaggatggacagagctacttctccaaagagtatttaatgcacatcgttgaccgtgttggtggcggtgattctttcggcggcggattaatttacgcatgcttaaacgattatgctccacaggataccatcgagttcgcagtagcagcaagctgtctgaaacattccgtagaaggtgacttcaacatggtaagcgttgacgaagttaagaaattagctggcggagatgcttctggacgtgttcagagataataaaattacgacaaaatcattttgttaattcctttccctaatttaatataacacctgtgacaagcaggtaatgcgtggtctttttacccatttagactgtgcagacaatgacggactgccgtttcatgaagccaacatgaaacggcagtttttttgttattttcctctgtatgataattttatattttgtggaaaaactattaggaaaatggaggtagtcatatgaaacagtttgaagggtatgaagaatatttaaagcagagtgaactttcgaaacagaccaggcaggtgtatctgagggaggcggaaaaatttgtccggtatttaaatggaaaagaaattacaaaagatcggacgatgctttacagagaaaaattacgggaggaggacctttctcctgcgacgatcaatctttatgttatagcggtaaatcgatatttaagatatttagaatgcgggcagacatctataaagacattaaaagtgcagaaaaaatgcagtgtggaaaatgtcattagccggaaagagtatcaggaattgttaaattatgcaaaaagcagtggcaggaaaaaatattattatattatgaggacattggcacttaccggaatacgtgtcagtgagctccaatatattacagtcgaaacattagagactggaagagtgcaggtttataataaagggaaaatcagagacgtttatttaccggatgttctgatccgtgaattaaaaaattttgcagagaggaaaaagaaaatgatggaatcatatttcggggaagaggaggagatccgatcaaccgtatcactgtttataaaatgatcgcatatcttggggatatggttgggattaaaaaagaaaaggttcatccccatagttttcggcatttttttgcaatcagctatatggagcgctatggaaaccttgcagagcttgcagatctgttagggcatacgagcattgaaacgacccgcatctatacaacgtctactgtagaagaaaaacgtagaaagcttaataatcttggattatagatgcaacaaaatattgtattatgttactaaactcatatgtagaaaggttatgtcttaaatgcataaagacataatgtattttctgtgaaaatacgtgcatatgaagaacacacacacatggaaagtgaggaaaaaaaatgagggcaaaacaagtaacagccttaatgatggctgcaacgttagcggtaactggtaacggcgttacagcatttgcagagccggtagcaaatgttgaagctggggatgcggcaacagaagctttaaacgttgaaacaacagaagaggttgagacagcagcagaggttgaggtaacagaagattcagaagacgtgacaaagagtgcacagaaggatgcttcttccgatgttactgtagaaacaaaaacaagcgcaactacagtaaaagcaggtgcgacagttactgtaacaacaactgtcaaaggggataaattaactaatggtactcttacagtaaaaagctatgagttgattgcaacaaaatctgcagttgacacgacaattgcaaccagtgcagatggtacatttgtatttgcaccagagaaagatacgacgtacaaaataaaagcagtgttcacacatgcaagcgagaaaaatgaatattatgcagaaaaagcgcttgatgcatttactatcgaagcagcatctatcgcaacaaacagacttcatgtgccggaagttactaccattagcaataaagatggagctgctttaaatactacagctgctccggaagtaacagcagcacttgagacagcaaataagttagatgaagcatatggtaagtggactgtgaaagatgaggcagttacaacagctacaaaagagattgtctttacattcacagcaacagacggtgtatataccattgataacagtgatactgctgcagtagagacagataagacatatgaaaaaacagtatctgttaaagttgttcagcttgctacaggtgtttccattgaggatgaaaacggtcctatttcaactacagtagagatggcaaccaccgataagaaagctttgacagcaaaagttgcagcaggatcaggaagtgatactgtttccaatgcaaaggttacatggacatccagtgattccagcaaagtaaaagttacagcaactggtgacaatgaggctgttatcacagcagtttctaaaacagaggctgggaaagaggtaacaattaccgcaacaacaacagacggaacccagaaagtcggcgagatcaaagttgctgtaaaagagggaatcaatgcagacagcatttcatttgattccaaacttcctgagattacttatgagggagctggagatcttgaagattactacaaagattatgtggctgcattaaacaaaaagaccacaattggtacttacagcattaaagatacatcagaaacaattgattctgttggcggtgtagataagacttcaactgtagcttctttgaaaaccaatacagaaaattcccagacaatcaaaaacggtttgacaattgttttcacattaagtgatgatgctggtcttacaccggttgatggaaaaacaaaatgggatacgaaaacagttgagaagacatacgatgttgtaatcaacagagcagtgatcaatcgtgatgcttctgcggtaactggtaagttggagagcagttatgctgccggagcaaaattaagtgaaatcttagctggaaaaaatgatgctgaatttgacatcgaagttcagaaaaaagtagatggtgcatggcagacaatctctgatgatacaccaaacatcggtacacttgcaaattatcaggtaaaatattctctgaaagacagcgcaaaaaatgtatacacattaagcggtgcagatgcaaatggatataaatatgtatccttaagcggcgtttctatcacacagcctgtattaacagatgttaaggcagaaaataaatctgaaaatttaacagcagataaatttaaagataaagatacgcttacgctgaaagcatcttacaatgaaaagaaacttggaactgctaattatactgtttcttatcagtggtataaactgaatgagaaaacgaataagtatgaagcaattaaaagtgcaacatctgatacttatacgacaagtacatttgctgacatcccaggtacatactattgtgagatcacagcagatgtaaaaggatctgtaaaagatttccttccggatgcaacagatgctcaggttgaagcatacagcaaactggtaaaatcaacaaacaaagttacggttgaggctactaagattacagttgatactactacttcaggtttaggcttaagcaaaacggaagctacttatggtgctacagcagatgtaaaggctatcgcaaaggttactgcagatgatgtttctgcttatcgtgtatattacaaacaggttactacagtagcaaataaaccgtctttaggtgaagcaaaagacatcacaaagaaatccgtaaatgaagatgaagctttcctgttcaagagtggaagaacaatttccgaaagccttggtaacttagatgctggtacatacagaatctacttagaggttacagccggaaaagagacaacaagctatgagatcggtgatatcaaagtagctcagaaagagatcaccggattaaattccaagaatcttaaagttgaggatgctacttatggtcagaagttcagcgatgctaagatcatttacaatgacacagagattgatgcagcgttagattttgcatttgttgataacacagtagcagacgctggaagctatacaagcaaagaggtagctgtttcagttgttgatccaaactacacaacagatacaaaggtaacattaaaagcaaatgtaaatgttgcaaaagctcctctttccgtaactgcaaaagatgtaacgatcgagcagggtcaggaagcagcacttgacggaaccgtaaaaggtttagttggcaaagatactgcaaaagttacttatgcagtattaggtacagatggaaaagctgttcagtcaacaaagaacttagcagttggtacatataagatccgtgcaactgtagaagatcagaaaaactacgatgtaacatcagtagtagatggaacattaactgtaaatgcagtagcagcaacaggtgtaactgtaaacacaactgcattaaagatcaatgttggtgaatccagacaggtcagcgcaacagtagctcctgcaaatgcagcagataagaatgttacatggtcttccgacaacacagcagtagcaaaagttacatctgatggtgtggtttatgcaatcgcagaaggaactgcaaatgttaccgctaagacagcaaacggcaagacagcaacaatcgcagtaactgtttcaacagtaaaagctgattctgtaaaactgagcgcaagcaaagtaactttaacttctatcggtgcatctaagacagtaaaagcaacagtaaatccgacaaacacaacagataagactgttacatggtcttcttctaacaagaaagttgcaactgtagataagaacggtaagatcgttgcaaaaggaaatggtaaagcaaccatcacagttaagacagcaaatggcaagaaagcaactgttaaggtaactgtaaaacaggcaaccaagaaagttgtattaaaagtaggcaagaaggttgtaacaggtaagacctataccttaaaggaaggtaagaaagcaactgtaaaagcaactgtaacagatgcaaagggcaagaaagttacttccggaaaccagaagatcaaatggactacttcaaataagaaagtagcaaccatcagcaagagcggtaagatcacagctaagaaagcaggaactgtaaagatcacagctaagacagcagatggtaagaaagtaacattcaaagtaaaagttaaataattgaaaacctgaaacatacggacacatgacctgagatgcgataatcctctggtatcggcattgagggaaaaatcagggatcaccaacgggcggcataaagttttgtgccgcccgttttggtttgcgcgccatgggcgcgctctaatgggtgaaagtcccgaacacgcctaggcaacgaggaagtgtatagcagaacagcaagggtgtc

SEQ ID NO: 5183 - DNA, 2828 bp, Unknown
  gut microbiota DNA sequence
tttaaaagcgaaatccctgttaagcgcgtatctggcttgacaatacagggcgaaataggctatacttaaatctccgagcagccggggtggcagcggtaccctgaaccagcaatccgctatagctggggtgatgccgaacggagggttgtcagattgtggagctgcccttcataagtggcgttgaagtttgggtcttacgcaacaggaatctgtgaaccgggtcaggtcaggaatgaagcagccctaagcagaagctcttgtgtgccgtaagggtgcctgggccgagttaactgtggaggtaacgtctgtggtctggattcgatgggaggcgctcggttttgtatatctaaaattgaccatatatcaggatgaaaggaattacagtggacaaactcagaaaaagactgtatcaggtaagtgaaggtttagaactcatcatagcgttagttgctgtggttggtgtggtcatagcggcggtaaatcttttcccggaacttctggtatactggcagaaccggacgaatggggaggcatttcttatttttctcgatgctgtgtttgacgtcgtgatcggggtagagtttatcaagatgctctgcaaaccaagttcacagaatatcatggaggttttgatctttctgattgcccgtcatatgatcgtacagaaaacgtcagcattagaagacctgttatccgtagtcagcatcggaattttattctttttccgcagattcatgctcgcaaccaaaccggataaggaacagcatgtgccggaactgttaggtgcaatcagacattcagggaataagcaggagaaagaaacaaaagataacgaacagtagatttgtcacagacaacagaaaattatatggaaaaggtaccgtatatcagacgcatgatccggggatcaggtctctggtatacggtaccttttgtataaagaaaaatacaatttacgttaattttttcacaaagatactgacagtatatcaaagttgagagaatatgtcaaataaaactgcatttatttgaatacaaatattgaatttcgaaaaaactgctatataatgaaaacatgatatgcgctggtagagagcgccaattacaatttataaaaagtgaggaattaatcatgtttggatttggacaactgatcgacatcttaaaaaaagatcctaagaaaatcgtgtttacagagggcgatgatcctcgtattttagaggcagcttcccgtctgttagcaggaacattccttcatccgatcttaatcggtaatccggataaaattgctgctgaagcggaagagtgcggttttaatatccgtggagcagagatcattgatccgactaattatgacagaatggatgagatggtagatttattctgtgaacttcgtaagagcaaaggtgtgacaccggagcaggcaagaggtattctttcccaggcaaactacttcggaaccatgcttgtaaaaatgggcgttgctgatgcacttctcggtggagcaacctattcaacagcagataccgtacgtccggcattacagctgatcaagacaaaaccgggcaacacaatcgtatcttcctgctttatcatggtacgtcctgcagctaccggtgagaacgaagttcttgcaatgggtgactgtgcaatcaacatccatccgacagaggatgagttagttgagatcgcaggtgagacagcacagtgtgcaaagattttcggtgttgatccgaaggttgcattcttaagctactctacacttggttctggtaaaggtgaggatgtagataagatgcgtaatgctgcagccaaagccaaagcaaaatatccggatcttccaatcgagggagaacttcagttcgatgcagcagtttctcctcgtgtagcacgtaccaaatgcccgggcaacctggttgcaggtcatgcaaacacatttatcttcccggagatcagtgccggaaacatcggttacaagatcgcacagcgtcttggtaatttcgaggcttatggtccgatcttacttggattaaatgctccgatcaacgatctgtcccgtggatgtaatgcagcagaagtttattctatggctatcatcactgcagcacttgcataagacggatgattggaactgttggtacgggtagaattttccgtgcatgacagtacgttttaaatacaaaacaaatatgacagaataaaaacgtggcatggcgtaaagctatgccacgttttggtttgcgcgccatgggcgcgctctaatgggtgaaagtcccgaacacgcctaggcaacgaggaagtgtatagcagaacagcaagggtgtccatcgtgaggtggaatctgaaggaagctgtaagcaaactcttggtccgacggacagaaatcacatataaggctcggaaatacggataagtctgccaaaagagatgaagtcctaaagttgctggaagtacgagtagatgtggcggatagatgagaggaaagagcgtgcaccttaagcgtggaggtctcacaggggtttcattagcctagtaacaacgaactgtgagaagtcagccgagcccatagtagtgaagaagtctctgtaatggagatagagcaaaggggcgaacaatcaataagtttgagtatgtctcgtattgcagaagagataacatctgccgtaaccaatcgggtaaaagatggtcaaatcaagcgggacggaaaggaaagaacgcatggacacaagtagtctaatggagcagatactatctaacgataatctcaacagagcatatctgcaagtcgtacgaaacaaaggtgccgagggagtagacggaatgaagta

SEQ ID NO: 5184 - DNA, 18912 bp, Unknown
  gut microbiota DNA sequence
cttttgtaaaaagggagatatttttttgcatttcactgataagagtgttacaatacgaatgttattaaattttcgaggaggtttacttatggacaagaaaacaacaggaatcgtttcctacatcacgcttatcggctggctgattgcattctgcgccggtgacaaagagggtgcaaaatttcatttaaaccagtcactggtgttataccttgcatcactgatcaacagcattattatttcgcgcattccgatctgtggatgggctgtcagcggcattctctccattgtattctttattttctggatcatgggattagtatatgcctgcaaagatgaagaaaaagagcttccacttttaggaagtattaagattttaaactaagatattaaaaaaaacattattatgtaaaaacccggctttaaggttcatgaccccaaagccgggtttctttttttgtgcacagacctgcctgctaaaacaggcagtctgctatcttatacgattttcttatacctctacggtaattttgtctaagtgccagatatcatccacatactcctggatcgtacggtcagaggagaatttaccggcatgtgcgatatttaagattgcactctttgcccaaccttcttcatctttgtatgcttccatgacgcgtttctgtgcttctgcataagaacggaaatcttttaagatgaaataggtatctgcaaactgtgtacactgtgtattgagcagtgaattgtaaaggtcacggaacagctcaggatcgttcggtgaatagaatccgttgatcagctgcatcagcaccttgcggatatcctgatccgtattaaagatctgcattggatcatagtcacggtttctctcatgtgcaatgacttcatcggaactcataccgaaaataaatgcattttctttgccgacttcctctacgatctcaacatttgcaccatccatcgttccgagcgtcagcgcaccgtttaacataaacttcatattaccggttccggatgcctctttacttgcagtagaaatctgctcactgacgtctgctgccgcaaagatccactctgcgatcgatacacggtagtcttcaataaatacaactttgatcttgccattaatgcttctgtcattgttgatgacatctgcaacattgttgatcagcttgattgtaagtttggcgttcttatagcccgctgctgcctttgcaccgaaaataaaggttctcggatagaaatccatatccgggtgctcttttaattcattgtacaggtacataacatgcaaaatgttgagcaactgacgtttgtattcatgcagacgttttacctgcacatcaaagatagaacgtggatctacttcgataccattatgctctttgatatattttgcaaggcgcagcttgttctgatatttgatattcatgaactcctgctgtgctttcttatcagttgcataaatcgccagcttttcaatatgggcaagatttgtgatccagtcatttccgatatgctcacttacccagtctgcaagcaatggatcaccatgcattaagaatctacgctgcgtgattccgttcgtcttgttgttgaacttctgcgggaataactcataaaaatcatgaagctgctcattctttaaaatctctgtgtggagttttgccacaccgtttacagaatatcctgctgcgatcgcaagatgtgccatctttacctgaccatcataaacgattgccatacgtgcaactttaccgttatcttccggaaactctgcctggatctgtaaaataaatctgcggttgatctcctcaacgatctgatagatacgcggaagcagccttgagaatatctcgatcggccatttttcaagtgcctcagccatgatcgtgtggttggtgtatgcacaagtctttgttgtgatctcccatgcctcatcccagctcaatccctcttcgtcaagtaaaatacgcataagttctgccactgcaacagtcggatgtgtatcatttaactggaatgttaccttctccggcagcttgtggatatcatcatgatgttttttgtaacgtgccagcgcacgctgtacacttgctgatacaaagaaatactgctgttttaaacgaagctcttttcctgcgatatgattatcattcggataaagtacttccactaagttgcgggcaagattttcctgctctactgccttgtggtaatctcccttgtcaaaggaatctaactcaaagcactccatcggctctgcatcccagatcattaaggtatctaccacatgattgccataacctacgatcggcatatcatacggtaccgctaaaacagactggtaattttcctgtataaaacgtgtttttccctcttctgtcacttctgcacggacataaccgccgaatttaacttcataggaatactccggacggcgaagttcaaacggatatccattctttaaccagttatccggcacttccacctgaaaaccgtctttgatcttctgtttgaacattccgtaacggtaacggataccgcagccgtaagctgcgtatccaagtgttgccagtgactccataaagcaggctgcaagacgtccgagtccgccatttccaagtgccggatccggctcctgatcctcgatctcatctaagttcagaccgatctcctcaagtgcctctttgacctctttgtacatttttaaattgatcatgttgttgccaagcgcacgacccattaaaaactccatggacatgtagtaaaccatcttgggatcctgtttgtcaaacgctttctgtgtggcaagccagtcatcaataatgacatcttttaccgtgtaggaaactgcctgaaaaatctcctgctgtgacgcctcatctaacgttttgcggtaaagattctttacattttcttttacatcctcaataaacgcttctttgttgaaaacattttccttcatctagttttctccttttttgactccgagcaatactttttccccattgatgttccattctttgcagtagattccgttttctccggagtcaaaagaatcagcttctgctacaacctcagtacctaaaacatcacccatgatgtcattttcgtacttattaaagatgtcggctactttttcatctgcatgatagtaaatggaaattttatccataacctcaaatcctgcttccttacgcatggtctgaatcttactgatgatctcgcggacaaatccttcctctaccagttccggcgtcaggtttgtatcaagtacgacagtcacggtattatcgccctctgtcacataaccttccatctgtgtcatggtgattaaaagatcttcctcagataattttacatcatcactaactgacggaagtgtaagtacaccgtctgcctttaattcagccattgccttgtttccgtctaactctgcaagtgctttctggatctgtcctaagaacttgccatatttcggtccgacagtacgaagctgtggtttgaacgtataacttgtatatgcactgacatcctctgtgaagtttactttcttcacatttaactcatcctcgatgatctccacaaaatattctggcagtacattcggtgctttgacatacatatttccgattggctgacgattcttgatatttgcagagttacggcacgcacgacccataacaacgatctttaagacctcatccatatttttctctaaatctttgtcgatccatgcatcattgacagccgggaagtcgcacagatggatgctctccggtgcctctgtattgatggaacgcaccagattctgataaatctcctctgtcatgaacgggatcatcggagcagcggccttgcagatctcaactaatgctgtataaagtgtcatatatgcattgatcttatcctgctccatgccttttgcccagaaacggtcacggcttcttctgacataccagttactcatatcatccacgaactcatcaagtacctttgcagcttccggaatgcggtaatttgcaaggttctcatctgttcctttgatcgcagaattcagtttggataacagccatttatccataacggataatttctcataatctaaagtatatttcgttgcatcaaactggtcgatgtttgcatacaacacgaagaatgcgtaagtattccacagagtacccatgaatttgcgctgtccttcctgtaccagcttaccgctgaaacgtttcgggatccacggtgcactgcttgtatagaaataccagcggattgcatctgcaccgtaagtctctaatgcatcaaacggatctactgcatttcctttggacttactcatcttctgtccattctcatcctgtacatggccaagaacgataacgttctcgtaaggcgctttgttaaataacagtgtagattctgccatcagggagtagaaccatcctcttgtctggtcaactgcctcagagataaacttcgccgggaactgtttttcaaatacatctttgttctcaaatggatagtgatgctgtgcaaatggcattgctccggaatcgaaccagcagtcgattacttccggtacacgatgcatttctttgccacagtccgggcatttgaaggtaactgcatcaatatacggacgatgaagttctacctttgcatcctccggatttccgcttctctctgcgagttctgcgcggcttccgatacactcctggtgaccacactcacactcccataccggaagtggtgttccccagtaacggttacgggaaataccccagtcctggatattctcaagccagtcaccaaaacgtccttttccgatggactccggaatccagtttacagtgttattgttgcggatcaggtcatctttgactgcagtcatcttgatgaaccaggattctcttgcgtagtagatgagcggtgtgtcacatctccagcagtgtggatattcatgttcaaacttcggcgcatcaaataataatcctttttcatcgagatcttttaataccataggatcggctttctttacaaaaataccggcatatggtgtttcttttgtaagctcaccttttccatctacaagctgtacaaatggaaggtcatattttcttccgacagcggcatcatcttcaccgaatgcaggtgcgatatgaacgataccggtaccatctgtcatggttacataggtgtcacatacaatgtaatgcgcttttttgtgctgtttttcaatgatctcttttgcacagtcaaataacggctcatactctttgtactctaaatcgcttcctttataagtctctaatacttcgtatgcctttgttccctctggtgcatccttgtcaggcagtttgccaagtaccgtgtcaagcagtgcctctgccatataataggtatatccgtcaaccgcttttactttgcagtaagtctcttccgggttcacacagagtgcgacgttagacggcagtgtccaaggagtcgtagtccatgcaaggaaatatgcatcctctccgattactttaaaacgtgcaactgcagagcgctctttgaccgtcttataaccctgcgcaacctcctgagaagataacggggtaccgcagcgtgggcagtaaggaacaattttgaatcctttgtataaaaggtttttattccagatttcttttaatgcccaccactcggactcaataaaattgtcatcgtaagtaacatatggattgtccatatcagcccagaaaccaacggtctttgagaaatcttcccacattcctttgtatttccatacggattccttacattttttgatgaaaggctccataccgtattcttcgatctgctcttttccgtttaagccaagaagtttctcaacctcaagttctaccgggagtccatgtgtatcccagccggctttacgcggaacgaattttcctttcatggtctggtatctcggaatcatatctttgatcgtacgggtctccacatgtccgatgtgcggcttgccgtttgcagttggcgggccgtcataaaaggtgtaggtctctccttccttgcggtgttccatgctcttcttaaagatgtcattgtcattccagaacttctcgatctgtttttctctgtctacgaaattcagattcgcatcaactttcttatacattgttaacctccattgatttaataaagagtcgctcgcgactctttcgcgcccgagcggtgctgtttacagcaaacttcttctccgcgaagtgcgcatcccgcccagagggctttttaattcataggacgtaatttcctatgaattaaaaaaaccctcgtcctgtatataggacgagggcttaattacttcgtgataccacctgatatacaaatgtacacggaactaataaactccggatacacgttccctgtaacgcaggaaatgcgtcagcgcttactctgtcacggaaaatcccagtcgtgatctgccttgaccatttcagactgcggcttggaagtgattttcattcagcagatactcgcaccggtttccacctgctccggctctctgttgcttttcctgatgaactactgtcttcgtcattgccttttaccaaaaatctagtctttagtatagactcggaaagtgagaatgtcaagagggcttcatgcttttcacagagcacgttttttcacatctgcgatcacgtttaaaaaccgctccttcatctgtgcctctaacagttttacatccatgtcactgcccgtacacggtacaaatcctccagccatcgatgcgtggccgccgccattgccaattcctttcagtgcctccgccacaatctttcctgcatcgagcatactcttttcactgcgcacggaaagtttgattccgtctgactttctcgaatacacgacggaaaatgacacttcttttaaagcaagcatgaaatcggatatatttgcaatgaccggacaatccttaccagtattgcagaaactgatgtcatcatatacttcaatacttgaaatcgcactcgaatatgccatcagatcatcaaaacacagattactgttttctaacatatggatgacctcataatcacattcatcaaacatccggtagagcatctcaatatcgagttttgacactccacggctcagattattggtatcgatccgtacaccgtatgtcagagtcgtggcgattcttctatccatcgggatattattttcaaagaaatactgtgcaacgatcgtcgcacatgctcccacttccggccggatgtctttaaaccggtatggaaacttttcattttccggatgatgatcgatgcagatgatctcgtcccccgtaatgtcaacgatgtttgaattacccttttgtgcatccacaaggatcacttcatcctcatctgtcaaaatggtactaagatcctccacattcaaaagttcgatctccatcagttcacgcagcttgtcggtactgtaacggtctatttttcctttataacagatcgtggaagaaattccattgtgctttaacagctcctggatcccaagcgcactcgcaatggcatccgggtcagggaaattatgcgtctggatatacacatgttttcggttgatctgttttagtagttcttgtaattttgtcatattaatcctctaaaatatgtttctgccacccgttttgtcacaagttctgaaaatgactgtattttatactgtgcttccggtacgattccaaaaccgtatgcggcatgaataaatccaacgccagcttttctgctggcatcataatctccctggatatcacccacatagaccgcttcgtctaaatgattccggtctgccagaagtctgatattatcacctttctgtaaaagattatttccgtaacattcgatatcggaaaaataatcccagaaatgataatgatccaaaaatgcctcaatgtaacctttctggcagttgcttacaatgtaaagttcatatgtcttttttaattctttgaatgtatcctcaagatccggataaagcactccgccatgttctcttaaataatcgttctcgatcctgcagcactccgctaaaagtgtctcctgctctttctcagaaatttccgggaataacagttttgcgatcacatccatggtctttcccataacacccttgatatcggcttctgtgagtgccttatttaaccttccatcctgacggatcgcttcattccaggattctgccacattggcggctgaatcccaaagtgtgccatccatatcaaaaataattccctgttttttcatataagtccccattcctgcgtgtaaaaattctcatttttcacacgattctgcttcatttattttaaatcgtaaacgctggcatattttttttcaaaataacgcaccaatggctctgctgatacttcttttccacacacatttgcaatcacttcttttggtgtgcgtgtgctgccataccagtggatcttttcattcagccattttgtgatttctttgattctgccctcttttaagatctcatctaccggccctaactctttttcaagctcctctaagtacatgccgtcatagatacttcctaacagatagcttggaaaatagccgaaggaaccatctgaccagtgcatatcctgtaagattccctccgcatcatttgccggagtgatatctaaatattccttcattttctgattccagagttccggaagtttcgcaaccggtacattgtcacgaaagattgccttctccatttcataacgcaatataatatggaagcaataggtcacctcatctgcctcggtacggatcaggctgtttctgacatgattgatctcacggtaaaactcatccagagaaatgtccttcatctgcggcatcagttcctgcactttctcatagacaggaatccagaaattcttattgcgccctaaaatattctcataaaaacgggattggctctcatgcacgcccatataacggcagcttcctgcagccgtgttgtcatattccggattgacattctgttcaaaaatcgcatgaccaccctcatggatagccgaaaacatggcagaaatcggatcatgttcataataatgatttgtcacccggacatccttggaagaaaaattcagtgtaaaaggatgctctgtctctcctactgcaccggcatctttggaaaatccgatgtaggaaagcaaaagatcctgcacttttctctgatcatccggatcaaaataaacatggaattttgtatcatccggctgttttgcggcaagtatttttttcacaagcggaatcagcgcttcctttagttcaccaaacagacggtcaatcgttgcagaatccattccctcttcatatttatctaacaatacatcataaacttctttgcccggatccgtgtaacctgccatttctttggtaagtgcaaccattttctccagatgcggtgcaaaaatggaaaagtcagatgcattttttgcatcttcccatgcatttccggattctgcctgctcacggaccatcacttcataacggtctttgggaatccgtctgtctttttccatatcgcgctgcatgcgtgtcacgataaatttcatggtatctgacagctgtgcaaattcttccggtgtctttaaggtctctaacatgccgtaaagttcatccgaagtcgacatcgcaaagctctcggttgaaaaataagtcagtgcatcgatatgtcctgcctgccccagttttggtgcacaggttctcatgtcccagtaaagaagcgtattgatatgttcatattttttcattttatcgagatactgctcgaattgttctaatgttttactcatagtcgtcctccattttcagaacgacgccggtctggcgtgttacattccgttctttctgttccatattaacacaggacacctgacctgtcacttatttttagtataaccaaaaacaccacgaacatgcgattttgcatgtccatggtgtttttcataacaatcagtctgcccgtagtgcgtgcaatctgttttttcatcggaaaccctgacgcaactacttattttacctctactgtccagccatatttatccggcagtctgccccactggattccggttaaggtatcatataatttctgtgtcagttcaccgatcttgaaatcgttgatcgttacaacatcatctttgtagcggagttctccgacaggggagataactgctgcagtacctgttccgaatacttcctcaagtgtgccatcatgtccggctttcatcagatcatctacggaaagtctggtctcatttactttataaccccagtctcttaacagatggatcatggaatctcttgtgacacccggaagaacagttccctcgatcggtgctgtgtaaatctcgcctgcgatcttgaacatgatgttcatggttccaacttcctctacatatttacgatgttcaccatctaaccagagtacctgggaatatcccatcttctctgctttaacctgtcctaaaatagaacctgcgtagttaccaccgcattttgtaaatccggtaccaccttttacggcacgaaccagttcatcctcaactaagatcttaaccgggttgattccctctgcgtagtaagcgccaaccgggcagcagataatcataaacttataagcagatgccatatgtacgccgagtgcagcttctgttgcaaacataaacggacggatgtaaagagatgtctccggctctgatggaacccagtcctcttctacctttaccagtgcttttaccgcctcaacaaacatatcaaccgggagctccggcatgcagagtcttgcgttagagttgatcattctctttgcgttcatctccggacggaataactggatcttaccctctgcggtacggtatgctttcataccctcgaatgtttcctgtgcataatgtaacgttacacatgccggatccatggtgatcggtccttccggaacgattcttgcatctttccagccctcttcctttgtccaatccataacaaacatatagtctgtcatatattttccaaatccaagatgtttctgatctggtttttcctttaaatgttctcttttttcaaatctgatatccataacatatgcctccgactctctatcgtttttttctgaccctcattatgatactttcttttttgagtgtcaagattattccaaaggcttatattcatcattacttaaactcataataatatttattttttataatcatgcgttatgatgctgtcataaaatcatcccgtaatttttgcctttgaaatgtactagttctgctctgcaattaccttttttaaaggaatccagataacaaatgcaagcacgcttccaattgccgccgtaataagctgtgtcacggaaaatgttgtctggaacactgccatctttggaaccattgcttccggaagcagggacggaatcagaaccagtgcaatcacgactcccataaataatgcctttacaatgctgccggctgccatacctgcgatcagacctgcattgcctttgattttctttgcaatcagactaactgcaactacaagaatgatatttccgatcataacgcatgggatgatcgccgggatcgctgacatgatcgggcttcctgtaatcaggaatgatgtgaccggtgtgatcacagataaaataattccgcatgccattcctgcacccagtgccgcaatgatcagacatgcattgatgatcggtcctgtgatgtacacacttgtgtttttaaagaactggctcacgatacagattgccagtaacactgctgttgttgtgatttgtttcgttgtgattttcataaatcctcctttgttttgcggagcaaaatgcctgctatgccgcctttgcatagcatgtgcccttgcaggagcaatgcccaacacattgggcaggattttcctcctttgttttgtacaattttcgcaaccatcatagtacaacacttatgaaaagtcaattttccgtacacggctcactctgcccccgcaaacaaccgcaattttctcttgtcatttaaaccagggaattttataataaaaccaacatataaatatttcgtataaatataaggagattacgttatgcatacatttcaacctatgacagcagatatgatggaatttgatccatttacaaagattggaaaagaatgggcgctgctcaccgcaggttccaaagaaaaagcaaacaccatgaccataagctggggcggtgtcggcatcttatggggcaaaaacgttgcctttgtatttgtccgcgactccagatacaccaaagaactgatcgacaaaaatgaattcttttctctcagctttttatctgaaaaataccgtgatgcattaaattactgtggaagtcactccggccgcgacgaaaacgataagatctcagcagccggtttaacccttacctcccgccacagcattccgttcatcgatgagggaaatatgatcctgctgtgtgagaaaatgtccgcaacgcgactgactgaggattccttcctgatgccagagattgcgcaaaaatggtatgcagatcatgatatgcacacgatgtatattgcggagatcattgatattctggcaagataagaaaaacaggcaggtgggagttcatatacgaaaactcctgcctgcccgttttatgtttttcagatatataatctcttaatcattttttgttccatacattctaaaatactcatccgcctgctgcatagatatgtttaatttatcctgcaatctttttataataccctttttcggtatgttcatttcgagacacatttctatcattccctctgctttgccacgaacttctccacgcgcttcgctctccgcaattaattcttcaatcgcctgacacatctctatcccctccttttcctctgatatcttaattggtgtcttcgtgatggtttttataactctggctgcattcatttctatacttttatgggtatctgtcctcaaaaaatccagcagtttttctttattattagagtacttgatatatcccataacctctctcatacttgttgaaaatttgttcagttcttcttccgtaagttttgccggatcgatcaggtgtatcctgtagttctccacataacttaaaatttccatatcccttatcggcatcatttcatgtaaagataacggtccgtcccattcctctgccccaaaatgaatcacaagtgtgataactggtttaatgtgatcttcctttaaaaatcccgataaatattctccaccggtttttcctgaataatctttttggctccgtcggtgccctgccgctatatctgacacttgttttccatattgtaaggcatcatagatagcgtttctgaccggcattgcataatggacatctgtctgattctcaacccctaataaaacatacgacatcttttcatcctgtttgatgactgctgcttttaaaacatcacggtatttttgcagtgcatcttttttacccactgccgatgtagcagtgtcaatctctgtaagtcctgccggatcgatcaccttttttccaccatagataagataattaaacgcatctgcaaatatagcattctcccgcatatactcttttgttacaatatcaaccgtccccattcatttctcctcctttgtttaatccggaagcaattcgtggttttcaagaattctccctgcttatatgtgtgaatgataaaagcattggaaattcttaagttgactgtataactttttatacatttttcactatgataaaagaatggtctataaccatgtagatgatttcagaatatcatgctttgtctggattttagcatactgttcttataatgtcattaaaaagccgatattccaatgatatttgtaagttttgcacaaaaaatccagtgtataaaaacagatataacatacacacaccttgctttttcccaaaatcaatgctacaatattttttgagttttgttctaaaaagtaaatatatggaggattatttatgagcccagttactatcgtattactggttatcttagccgtcttaatcatcggacttgttgtcctttattttctcgggaagaaagcacagaaaaagaaagccgaacaggatgaacagcttgcagccgccgcacagaccgtatccatgctgatcatagataagaagcgaatgcgcattaccgaatccggtcttccgcaggttgtgatcgaccagacaccgaagatgatgcgccgtaccaaacttccaatcgtaaaggcaaaggttggaccaaaagtaatgtctttgatcgccgatgaagctgtatttgattacataccgatcaaaaaagaagtaaaagccaccgtgagcggtatctatatcacaaaagttaccggtgtacgcggacctcttgaaaaaccggaaggtaaaaagagctggagaaccaaattaaaagaaaaagctaatcgcgcaaataaagaactcgaaaaagaaaaagctgaacttgaaaaagagaaaagcaagaaaaagaaaaaataagtcataaaaaaataccacacaaacgtgcagtattcataacaccgttaacagccacagcaaactgctgtggctgttcttgtattctttgctgctatgtgatagtatgaaaccaatcggacttacaaattattacaccggatttttctcctgacaaaataaataaaaaaatgtgtctccaataataacgctgcaagggtaaaacaatatttataatactgcaaaaagcatgttctgcaattcttttgaattgtaaaacatgcttttttctatagctttttacgcttttgctttcgcttccccttccgggaaaatgatcttattgacaaagaaaaatacgaccattgaaactccaccgtttaatacggttgttccgatattgtagagccagtccggcacgaacataccggctactgctacccagatacagttaatggagtttacaatacaggtcacgatacagaatgcgatcagataccagaatgcctgataccagatatttcccttactccggaatacgaaggttctctggatcggaaaattgatacactctccaatcaccatggcaatcatgtatgcacagaaatatgggagtcctccatgtgcggcatcataaccgataatgttccatttaaatgtctctccaaataatgtgatgtcgattcccgggaatccaaaatcaacatttggaagtcctgcaaatgcgagcggcagaaacaataacatcaaatatttgaataccgtgatcaggttacttacgatcacgaacagaccgccctcccggacccatttggaggctccgggatgcttatctgcaaagttctgccatagattttttataccattcatttatgctttcacctctatgtgttgttcctctgcaaaatcctgttttattctgctgatgtttcagttactgtctgtaccggttcttctgctgcatcttttttatattttttgatagtaagaacttctaagaagataaccagtgctccaagaatgatatcgatcacgattgcaatgatctgccagttcatcagacctgtctttaagttctcaggatcatatgcacggctgtttacaacagtgtacataatatttttggatgcctgacgcattgctttcacacctgttgcgcttgtggtatctgtcacatggtttgtctctgtatcatatgcaactaacatacaatctgtaccaccacgaatacccatatccgaatccatgtatccgtaaacaccaaagtagtcagttaatacaaatccacggaatccccactcatcacgaagaacagttgtctgtaacggatatgttccgcctgcccactgtgtaccgatatagttgaaggaagacattactgcttttgctccaccttcttttacagcgatctcaaaaggttttaagtaaatttcacggattgcctgctcatttgaccatgtacagagcattccggtacggtttgtttcctgatcgtttaatgcaaaatgcttgatatatgcataaacaccatatttttcagcaccgatcactgcgtttgcagccatttttcctgagagaactccatcttccgaataatactcgaagttacgtcctgcaaatgcatttctgtgtgtattcatcgctggtgcataccatccggatacttccatttcgtctgccatcttaccaatgctctcaccgaaggaaagtgcaaggtctttgttccaggtatttgcgatcataactgcggacgggaatccaatggagcctgttcctgtaaagttgttgttgatagatgcaggtccgtcacagtcaacggtcataacttttcctacacttgatgctgcagatgtctgatatccgccaagtgcgatcattgtatccatatcagaaacagtcagctggtcaagaagtgtatcccatttttcatcatcataggaaagaccacgcatatcagcaagtgtcattccgtttttcgcacctgttgtcggcatttcatcagaatcattgttgtaattgtttggatcataattgctgttatttaagaactcagctttctcatcctctgctaatgtaaagtttgaaggagctgctgttgcttttgcatagtttgcaaatccatctgctcttgaaaggtatgttacatcgccttctgcatatgcaaactgatttgttgcagctacatcatcggtagaacgtgcattattctcatcatatacaacggtatctgcaacacttacggtctgtgatgcgatcgtattgtgtgaatcagagttgatagaaatctcatagtcaccagcctctaatacatagcatccattgccatatgtatcataagaagccatatcttcttctgagaaacttacattgattgtctgggattcacccggctgtaacacatctgtttttgcaaaatcgatcagatttgcagatgctttttcaattccaccgtttgtatatggcggattgtaatatacctctaccacatcttttcctgcggcagttccgttgtttgttacggtaacgtcaaaggatactttaccgtctgctacggtaacatctcccatcttctgttcaaaatctgtataagaaagtccatatccaaatgggaactgaaccgtcttatcataatcaatgagtccttccactgctgctgtctcatagaaacgatagccaacataaatgccttctacatagttgacaaaagatggaattgttgcttcttcttcgcctgttccgaagtttttggatgtagcggcaaactcatccatattgtcatacaggaagtttccaaagttgttataagtcggtgttgctgtcagatcatatacaaatgtatcgctggtttttccggatggatttaccgtaccggctacgactgcgccaagagactcaaatccggactgacctgttccaggacaccagattgcacccttgatctgtttataatcatttaagaatccaagttccatggtgtttgcaccgttatatacaacaacgacattgtcaaagttggcacaaacaaggtctaacatatctttttctgtctggcttaactgtaaataatgttcaccagcttcaaaatctttgtaattttcagagttatctgtgtaagttactttgcttacatcagttggaaggtctgctccctcaccaccaacacgggtaattactaccattgctgtatccgaaaactcttttgcattgttgatcagctcatcgctgtaagaatctgctgtaggctccggcaatgtccagtcctgcgcccacataccaacttccggtctgtcctcacggtacgctttgtagaaatcggtcagttctgtattgatcttgtatccggcatcctcaagaccaccaagaagtgttgttgtctcatatgcgtcggataatgctcctgatcctgtaccaccgtagcaaggattggtagatgcccatccaaacacgttgatattctgtgtatttgtaagtggaaggatattgtcctcatttttcaataatacaataccttcgtccgcgatatcctcacagagtgctgttgcctcatttgaggtctcctctgtgatcgtaccatttcccattgcaagtgagatcatacttgacatcgggataaagcagatcagattgataatcacaactgctgccataaggaatgcaatccatgcttcctttctcaccagtttctttaccggtttcttcaatttcatgcatgccacagttacaataattgcgagcgctaatgcaatacccagcgcaatcaggtatggcttacaggaattgagaacgttgatcacgtcatccatgttaattgctaacatttctaaatcctcccttgttttccgaaggaaaatgcaattttacaatgtaaaatttatctgctgacgagcagaggattttcctcccttgttttctttatccgtttcggatcttgtaactgtatcctaccataccacacgtcctttggtaaaaatcttcacaatctgcacttttttcgcataaactgttttgcatgttggaagttttggacaatagggcagaaggaaaataaatattttcgcccctcccattgaaccgtacgtacgggtctcgtatacggctctacaatttatattccaactttaactaagtaataggataagggattgagcagaccagctccatcttttatcctatccttcctgctcaggagtccggttatctttttcatggaaagaaccggaattggatgcctgctttacccatttgtcaaacagggaagtagcaatgtcatattcacggcagatatcgcatctgcgtttgccggaacaatatagttccaccagttccaaactcttgatttacaatttcggtttacgtttacca

SEQ ID NO: 5185 - DNA, 7638 bp, Unknown
  gut microbiota DNA sequence
cacctaatcgccttatcaagtttctgttcgtaggctcaagaacttcgctacaccacttcctccatccataccgttactgataccgatttgtagttcgctacacttggcggttaatacccgtgactggacttgccccagtaagattagtgccatgctcggcacacaaacaaaacgagacatccgtaaaagtctcgttttgatctgttatttgaaaataattctgataaaacaacaaattctttgcccaacttcttaatcaaacagaggatgtttccatgtagaaacattctgatgtcctgcggacaatgctccatctaccggaatggctgcccctgtaatatagcgtgccaaatcacttgcaagaaacagtgccagatagccacattcctccggatttcccatacgtcctgccggacagtcttttgcgaagaatgttaatgcctgttccggcgcatttccgaaaatagaagttttggtatatcccggacagattgcatttacagtaattccatacggtgcataatcaagtgcagccacctttgtcatacctacaacgccatgcttcgttgcagtataaagtgcctgcccacgctgcggtatgattcctgcaattgacgcgacatttatcagaaatcctccctggctgtgggatttaaaaatagcttctgccccatatttcattcctgcaaaaacacctttactgttgagtgcaaaaatcttgtcataatcttccatttcatattcatgcaatggactgcctccctgcccgataccggcattgcttacgatcccgtctaattttccgtaatgttctacggttttgtcgaccagatttttaatctgacttacatcactgcagtccgtctgtataaaaaccgcatccccgccatctgcacaaattgcgtctgccactgcctgtccctgttctacacttctggctgcacagactactttcattccgttttcaccaaaaatttctgcaattgactccccaatacctctgcttgcacctgttacaattgctacttttccttctacacttgaaaaattcactttactcaaatccttccttttgatgctatttatgccgacaccctgtgttcttcttttaaccattctacttcgtcataaattgtatcagcaaatggtcttgtctgataccccagttctttctttgccttgctactatcatatgcattatttcgtactaagttgtatagcattaattctgttatcaatggggccttgtttgttagtcttccaattgtctcacttacttttacaataatccttgttaatggcattggaagaattattttcgtcattttcacaccacttgcatgactgatataagcaaacatatctttcatccaaaccacatcattgcccaatatatagccttctccaattctccccttatctaccgcagcaattgttcctgcagccaaatctcttacatctactgaattgaatgaccccggaaatcctaccttatttcccccattacaatactgttcaataaaagtcgataccggtccaccagcgtaatcatttggtccacatatacctgtaggatatactacgcacgcctttaatcctttttcttttactgcatcaaatactaactgtgttgccatagcttttgtttttccgtaatatccaactattttatccaggtcaaatttttccggttctctcataaattccccgtgcggaagctctgccacggttcctgtcgaacttacatatacaagtttttccacgtttttttccaaacaaaaatcaataatattttgggttccctcaacattaacccgatataccagttcactgggttcttcctttaaatacacaatacttgcacagtgaatacaaacaagttgttccttttccacatcaaaaaaattttccaaagaagtcttatctgtcaagtcaccatacacgatttctactccttccggaatgtgcttgacagccttatcccccttcaacacgagtcctcgcacccggcatcctttttcaactaactgcctggcaatattattcccaagaaaaccagccgcacctgtcaataaatagattctgctatcctccatcctgatattcctccttcttttcctgttctttgcataccttaacaaaggaagataaacgcagtataaactttttcaaattaattttaaaaatatagtgacagtggttccctttcccaatgtactttccacccatatggttcccccgctaagctccacaatgcgtttaactattggcaatcccataccaaatccactggtttcgtgggacgcatccccctgataataacgttcaaacaaatgctgctttgtctgctcatccatcccctgcccctcatctctcacagtaatccatagatcatcctgtgttacctttccttctacaaagacaaggtttccttctgatgaatattttctggcattgtccaataaatttacccagacctctttcattaattcctcattgccatagaatttcatttctggcagctcagcttcaagctgaatatttttttcttcaaaagatggcatcagtaatatcgcgcagtcacggatttgagaatcaagccggaactcttcttttttccgaagtacttccatatgatccagttttgataacaacagcgtattttgcgataactgtgccagtctcccagcttcctccgccatgacattcagatattctttttcctcttctcttgtaatttcattatgctgcagatattctgccattccctttattgagtgaatcggtgtcttaaattcatgcgaaaaatccttcataaattgtttctgctgctcatctgcattttttaattctcttaccatctggttaaaattctcatatatgactttatattcaccagaattttctatgggaatctccacatctaactttccgtttgccacatcttccattccatttaaaagtttttccatcctgtggtacagcataactgaaattatcgcaatcacgattccacataaagatcccataatctgataaattgccacactccaggcaaacacattatcacctgcatgaccgtaataataaaacctgattgccatcgtaagcagatacgatacaacggaaaaaaaagtaacaataaaagctaatacgattgcccagcgaatggttcctattttcttgtttctttttgccccgttactcattcagtttccctctataacccaatccacgaatcgtaacaatttcaaattcattccagtctgcaaatttctttctcagacggttgatatgtgttcttaccgttgtctcatctgaatttgaatcatatccccagatattgtctaaaatctgggataccgtaaaaattttatttggatatgaaagcagtttaaatagtaattcaaattcctttttcggcaatgttatcttctcttcccctctgactaccatgttgaaatcctcactgattaccacatctccaataataatctgtttttcattgcttatctttgccctccggagcaatgccctgatccgccactgtaattcctcatagttcacgggtttcgtcatataatcatcaattccaatagcaaatcccatttttttgtcctgccattctttttttgctgttaaaagaagaaccggtgtgttcttatccatcatccgaaactgctccacaaattcatagccattcatttttggcatcataacatctgcaatgatcagatctactgactgatgctttaacagttccattgcctccattccatccgatgcttctactacctgatattcgtttctcaaatgcagttttgtcaccagtcttgcgctgctgtcatcttcaataattaataccttcaccatatatttctcctgtaaagcaaaacttggcatcagaaatatctgataccaagtctcccattccgttattttgtcatttacaatgaatatcttcctgaatctaacacttctcttcttccatcgggtaaaatcacctctgcatgcgtatttgacgggatttcaaactcatatgtgactttgtccccatcatatttccagccgctttcaattctgccatatggcgactgataggaagccttcgcatagccaaggactttatcgggatgcggacagattctgatttttccatctgaaacctgtattccgcatacggcatccaggatccatccacatattgcgccataagaataatggtttaacgatgcctttacctcgcccttttcattaataccatcccatgtttcccagatcgttgtagctccttttttcacctcataaagccagcccggtcttgtatcctgcagcaacagcttatatgcagtatcctcatatccgtaatcacacagtacccttgtcagattcggggtagataaaaatccggtatttaaatgatatccacatttttttaccagttcattcagatcggctgctgcctgccttgcttcatccccatctaaaagtccaaacgcaagtgccctcacataatcagcctgtctgtctgaagagatctttccatcctctgttgctataaaacgccatgccttctttgccatctctgcggttttactgtaataagcagcgtcatcttcttttccgagaatcgctgcgatctctgctaacatccgccctgagtatgcaaaaaatgctgtggcaactttgccctgtggtgtgcgcatagcggaagtactttccacatcaggctcacaccactcaccataatcaactcctgtttctatcgtatatctgcggtatggatttctcttaaatctttttacagggttcactggacgcttttttgcacgctcttcgagaaatacataccatttcttcatcatctcataattttcggataaaatccttgcatcaccataccgcctgtacatctcatatggaacaatgatacatgcgtccccccatcctacggaaccggcaagaagccccgagaaaaaagatgacttgttattctttggtgcaatatttgcaatttttccatcatcaaactgcgatgttctgcactctgcaagccattttcgcattaccggataggcatccataagatacagtcctgtatgggcaaatactcccatatccccagtccaggctgcccgttctcttgtaggacaatcggtaggaacatcacaaaagttggatttctggctccagatactgttttgcaccaatctgttaatatcgtcatttccacactcaaaaattgtcagtgtatccatctttgaatatactgcaattgcagtaaatgatgcatctgagaggtcaatcactgtatcagcctttgcatatctgaacccccatatagagaactttgtcttatagtgattttctccctctgcacatgtatacacaacctgctgtttcgtgccaccttctttatgacgttttctgtcctgaaaattttcctgcgtgaaattaccattttcgtctaaagtctctccatgtgtcaggacaattgtatctccttcatgggcattcagtgtaaactccacatatcctgcaagattctgtccaaaatctataaccgtctctccatttggcgtcgttataatctttcccttaaaatactccatttcacatacaggaacacaatcagaacatatcaactgatcaaaagaaaaatcctccacctttacctcatggtactctgacacctcagccagtcttgcatccacaatttccccctgctgcatatcattttgacgtatggcaccattttgtgaagcctcccatgtttcatccgaaacacatacagccctgccatctgcctcaagctgaaacagcagggcaatatctgtaccataaatattcctgtctccatctactccagagacacttctgtaccagccatcaccaagaatcacttctacttcatttctgccctcacataaaagtcctgacacattataggtctggtatgcaagtctcttatcataattatagctgcctggtgcaagcacaaaatcccctgctctttttccgttaatccagacttcatataaaccatgggcagttacatacaatcttacacttttatttaggattttttcatcacattgaaaatgtgttctcagatagctggctggcttatgtgcctccggattacattcagactctggatttatccattttgccatccagtcagacttatctaacaaccccatttcaaaaaaggcttcctcactccactcaccagcttcatccctttcgtcccatagtcgtattttccaggatatacgctgtctgcttttcagctccaacggacaatacgtatgcatactgtccgactttacccggctactgtcccaaaccacacaattttcatccatagccacgatctcatatgcggtctgtctcctgccatctgcacaattccatgacagatatggctcctttatatcaattcctatgggatttatcatatgttctgttcttaaattaattgctcgcataatttttcctcatgtatatttaaacagttccaatatgttcattcaaaaattttgcagatgcctcaaatgattttatcggcgacttatctatccagtttttgtgactttccagcacgaccgcctccactcctgacgacaacgcctgcccacataaggcttcaagattcatgttaccatatccaagttcacagctgtctgacttaagaatcggtgtcattacaggctttgtaagctttgttcctctgtcattaatgtggtacagcttcattctgctgcccagcattttcataacatccagtgcgcacacaccagcctctgtcggccagtaagagtcaaactcaaaacctacatattctggatctgtatttgagataatatattcatacgcattctgtctgccatccactttttgaaattcgtaattatgattgtgatataagagatttataccctctgctttcagtttttttccagcttcattgagccttttacacaggtctgtaacctgcgtcttatcgcgataatcaaagcggtacattcctgtaataacaacattggtggtattgtatttttctgcttccctcactgtcttggcaagttctttttctataccacctaaatccttatgcagactgacaacagaaagtcctgcctccttcaccagctttgcccagtcaagattgcctccttttcctgtaggcatgcccgcagctttcgtgagcatccgcaccataaatggggtaggattaaccataaagctgtttagttcgattccattatatccggcatttaccatcgcctgcagtgtctcttttgcctttgcttcactgcctgtcactgttccaagcataatctgttgtactgctttgatcgccatgaattttctccctgtttttcttatcttacaaattttctacaaactgaagtttttccttccgtaattccattttcattaaatgtatccactcttacatagtaagattctccgtcaacaagagctcctattctctttttcgtgtcatatgtgagatagctgtgatacagcttatctggtttaagtccccagagaatattgtatcctgtcgtcccatccgcttcatccttctcctgtgaatcaatcacaatctccatgtctattccggaaatt

SEQ ID NO: 5186 - DNA, 16056 bp, Unknown
  gut microbiota DNA sequence
taaaatacgtttgatccataaccagatccataagcggatggaggcaaaaaaacaggaaaatgaaaaagaaccacttacgggaatgcagcgctggacgcttggatttttgcgggatcatgatggaaaggatatctatcagaaggatattgaaacggaattttcggtatcgcgggcaaccgcatcaaacatgcttgcagtcatggaacggaaagggctggtgcgccgtgagacggtggagcatgatgcgaggctgaagaaactggtgctgacagataaagcacgtactatggtagagaggtcagagcaggatatgcgtgaaatggaagctcttttagagaaaggactgagtgatgaagaggtaaaagatcttaagaaatatttagaccggatgcttttgaatctggatgtggatattacctgtccgaagaattctttctgtggtggcatgaaaaaatagaaacactagatattgtggttaatgatgcaggatatacaagtgaaaaaaatgacgaagaaatcaccttaaatttggtaatagtgaataaagaccgcgtatttactggggttgcaacgatcgattctgtccggatatcataaaaatgggaaaatatatatgttccaaacgcattgacaaagacacaatatattgtataataaatactcgtaggttatgcggccgtatgggtatggcaggcagccatcagtcagaacagaaagggatttgatcggaaatgaaaattattaaaagaagcggtatggaggatacctttgatattaaaaaaatcgagtcggcgatccgcagagcgaacaacagcgttattgattatgagaagctgacggacaagcagattgacgagatatcaaaaaatgtggaagttgcctgtgaaaatatgaagcgttccccaagtgtagaggaaattcaggatatggtggagaaccagatcatgaatcagcgtgcatttaatgtggcgcgcaactatattacataccgttacaaacaggaactggtgcgcaagtccaactcaacggatgaacagatcttaagtttgttagagtgtaataatgaggaagtaaaacaggaaaattcaaataaaaacccgaccgtaaacagtgtacagagggattacatggcaggtgaggtcagcaaggatatcacaaagagatttttgctgccgccggatattgtggaggcgcatgagcagggaatcattcattttcatgatgcggattattttgcacagcatatgcacaactgctgtctggtcaacttagaggatatgctccagaacggaaccgtcatcagtgagacgatgatcgaccgtccgaagagcttttcaacagcatgtaacattgcaacacaggcaatcgcccagatcgcaagttcacagtatggcggacagagtatttcactttcccatctggcaccgttcgtacaggtcagccgtgaaaaataccgcaagcaggtccgcacggaactggaagcaatcggagtgacaccgactgaggataaagtcaataaaattgcggagatccgtgtgaaagaagagatcaaccgtggtgtgcagatgatccagtatcaggtgatcacactgatgacgacaaacggacaggcaccgtttatcacggtatttatgtatttggatgaggtaccggaaggccagcttcgcgatgatcttgccgcagtgatcgaggagatgctccatcagagaatccttggtgtaaagaatgagcagggcgtatacattacacctgcattcccaaaactgatctatgtgttagaggcagataatatccgtgagggtaccaaatactggtatctgacaaaacttgcagcggaatgtacggcaaagagaatggttccggactatatttcagagaagatcatgaaaaagttaaaagacggcaactgttatacctgtatgggatgcagatctttcctgactgttgaccgcacaaaaggaaattatgcaaatgcaaaaaattacgttccgggtaagaagtattacggcagatttaaccagggagttgtcactttaaatctcgtggatgtcgcatgctcttccggaaaagatatggataaattctgggaacttttggatgaaaggttagatctttgttacagggctctgattatccgtcataagagactgctcggtacaccttctgatgtggcaccgattctctggcagaacggtgcactggcacgtctgaaaaaaggtgagacgatcgataaacttttatatgacggttattccacgatttctcttggctatgccggactttgtgagtgtaccagatacatgaagggggtttcccacaccgagccggaaggaacagagtttgcattaaaagtaatgcgccgtttaaatgatgcatgtacggaatggaaagaaaaacacaatatcgatttcagcctgtacggaacaccactggaatcaacgacttataagttcgcgaaatgtcttcagaagcgttttggcattattccgggagtgacggataagaactacatcacaaacagctatcatgtccatgtgacagaggaaatcagtgcattcgataagttgaagtttgagtcacagttccaggagctttctccgggaggtgcgatcagctatgtggaagtgccgaatatgcagaataatcttgacgctgtacttgcagtgatgcagtatatttatgacaatattatgtacgcagagctgaataccaagagcgattactgtatggaatgcggttattccggagagatcaagatcgtcaatgacaaggacggcaaacttgtctgggagtgcccgaactgcggtaaccgtgaccagaacaagatgagcgtggcgcgcagaacctgcggctacattggaacacagttctggaatcagggcagaacacaggaaattaaagagagagtgcttcatttataaaattcatattgcgaaaaagaaccgtatatcaacattgatgtgcggttctttttatgataaactgtaatggtactaaatcactaaaataaaaatttaactttggaggataaaatgttagaagcaggaatcaaaggacagcataccattatagtagagaaagaaaatacagcagcagtgatgaaaagcggtacgttagcagtattcgcgacaccggcaatgatcgccctgatcgaggagaccgcatggaagagtgttgcagatgaactcgaagaaggatgtgtgactgtgggaacgagccttaatgtaaaacatcttgccgcatcaccggtgggaatgaaggtgacctgcaataccactttagtggaagtggataaaagacgtcttgtattttccgtagaagtagaggatgagaccggaaaagtcggagaaggaacgcatgagcgttttattgtacaggcggaaaaatttcagaataaggcggatgccaagttaaatagataggaggaaacattgaatttagttatcgggttactggtcccgtttctgggaacttcgttgggggcagcatgtgttttctttatgaaaaacgggttgaaccgtctggtacagaaagcactgcttggttttgcatccggcgttatggtggcagcatctgtgtggtcgctgctgataccatccatcgacatgtcagagggaatgggaaaatttgcatttttaccggcagcaatcggatttatatttggaatcctgtttttactgctgatggacaaaatcattccgcatcttcatatgaatgaagacaaaccggaaggattgccaagtcacctaaaaaaaacaaccatgctggtactggctgttactcttcataatataccggagggaatggcagtcggtgttgtgttcgctggacttttatcaggaaacaacggaattacactggcgggagcattttcattgtccataggaattgcaattcagaattttccggaaggtgcaattatatcgcttccgctgaaaagtgaaggcggcagtacaaaaaaagccttctggtatggcgtggcatccggtgtggtagaaccgatcgcggcgggaattacgattattttagccggaatcatcacacatatgctgccatatctgcttgcatttgcagcaggggcaatgatctatgtggtcgtggaagagcttcttccggaagcatcagaaggagaacattccaatattaatacgattggatttgcggcaggttttctgatcatgatgatattagatgtcgcattgggataaaggaggaaataaatatgcaggacgatataagagaacagctgatcaaacagtttccatcagatgtggtagagatactggatcagagcggtaaaccatactatggctgtccgacctgtaagagggcagttacagtaggaactgataaatgtccgggatgcggacaggtgcttgcctgggatcatatccgcaaggaaaaccaaaaaaaggggacgatgacagcagtgttgaaatttgaggtggcaggcgattttacaaagggagactgcagaaaatgtccgctttcctacattgcaaaagaaaaaaatgaaaatgtttatgaatgtccgttgaaaatgcgtgcaaactgtaaacttgagcttatgtagaaaggaaattcatgcgcggtgtacagatggtcattatagcggtcggaggcattttattattctggttcttcgcgccgctgttatgcaaaggaatttttaatataggaacggcgaccgggattctgatctcgttattcctgttatgttatggaatttttttcgggcgtatgaacaggagagctttgatattgtggaatggcaggaaaacacactggatatgtgttttcctgcttgtccttgtacttataatgatcatgacagtgttggcagagacatttctgatgatccactcagcattacacactccgccgcaaaatacgacagctgttgttttaggatgcagtgtaaaaggtacaaaaccaagcagaatattagaggaacgtattgatgctgcatatgattatctgagtgtaaataaagatgcagtatgtattttgtccggtggcagaggaccgggtgaagatatcacggaagcacagtgcatgtatgaagtgctgacaaaacggggaatcagtgaaaatcgtctgattttagaagaacgatctacaacgacggaagaaaatttaaaatataccggagaaattttaaaagaccgtggacttgatatgactgtgacactggttaccagtgaatttcatgaatatcgggcgaatcagatggcagccaggctgggaatgaaaagttacagtaccccggcacatacattttttgtatattttcccacctattatgtgagggaactgtatggcattttatattatgaattgcgtcattgggattagtgtggaagtatttttataaaaacagtgcagtaataaaaagtggaatgtcagagagaggaaaagatgccaggaaaatattatgcagtaaaaaaaggaagaaaaccgggagtgtaccagagctgggcagaatgtaaagcgatggtggacggctttcctggagcagtatataagagttttaaaacaagagaagaagcagtggcttttgccaaagctgcgacatataccggagcagatgctgcgccaaagatgcaaaatgcaatgaagaaaacaatgcagcaggaagatggggcaatgccgtctgtctatgcgtttgtggatggttcttacaatgtggcaacgcatgtctacggatatggtggctttctgattcatgatggcataaaagaagtgctgcaggggagtgataaggatgcagagatggcagcgatgcgcaatgtcgcaggggaaatctgcggcagtatggctgcgatcagaaaagcggtcgaattaggattgccggaagtaacgatttattatgattacatgggaatcgaaatgtgggcggccggcgcatggaaatgcaataaaaaaggaactatggcataccgtgattatgtggcttcggtgcgggatgtgatccggattcatttcagaaaggtaaaaggacactccgggatcgatggtaacgaggaagcggatatgctggcgaaacgggcagtaggaaatgagatttaaacctaagatccgggggcagatatatggataaaaagttaaaatattatgatctgatggaggacttaagaaagcagattgtttcgggaaagataaaaccgggagaaaaactgccatcggaaaatgaactttccgggacatatcaggtaagcagacagactgtacggaaagctctgcagattcttcagaacgagggatatatttatgcggaacatggacgtggaacgttttgttcggagatggcgagacgcacgggtgaaacaaaaaatatagcagtggtcacgacatatctgtctgattatattttcccgagagtgatccagggaattgataaagtccttacggaaaatggatatagtattcttttaaagaatacaagaaattccagaaatatggaagcgaaatgtttagaggaactgctgcagaaaggaattgacggtctgatcatagagccgagcaaaagccagattttctgcaaacatatcaatttatatcagacgctggatgagtaccggatcccatatgtatttattcagggcagctatgcacagctggctgaaaagccgcatattctcttagacgactgccttggcggatatctggtcacgaaatatctgatctcactggggcaccatcacatcatagggatatttaaagcggatgatacgcagggacagcagcggcacaaagggtatgtgcaggctttacaggaagcagggattgcgtatgacccggataaagtggtatggttttatacggaagaccggaaaacgcatccctatgagcagatgtatcatatggctaagacacggtgtgtgcatttttttgacagtgtggtatcctataacgatcagatcgcacttgaagtcatccgggcattagaagatgccggactgaaagtcccggaagatgtgtcagtgacggggtacgatgattcttatcttgcgtcaagtggaaaagtgccgcttaccacggtggcgcatccgcaggaaaaattaggtgaaatggctgcagaacttcttcttggactgctgaaagagggaaacatcctggagtcagaaagacagatccttgtaaagccggagttagtgatccgggaatcctgcagatcccggaaaaaggaggaataaaagatgaactatgcgcagatcaaaccctgttctattgagaatggcacgggcgtgagggtgtctttgtttgtgtccggatgcagacatcactgcaaagagtgttttaatgaggaaacatgggacttttcttatggtaagccttttacaaaaacgacagaggatgagatcgtgcaggcgttagcaccgtcctatattgcagggctgacgctgcttggcggagatccgggtgagccggagaatcagcagggactgcttcctctgttacagagaataaaaaaagaattgccggataaaaatatctgggcatacagtggatatctgtatgaggatttccttccgggaggaaaggtgtattgtgaggcgtcagagcccttcctgtcaatgatcgatgttatggtggatggaccttttattttagaaaaaaaggatatttccctgaatttcagaggatcttcgaaccagagaatcattgatgtacccgaaacgcgaaagaaccaggaaatcgtattactgatggaataaagaaaatgaaatggagagtagtgtgaaaaataagatttttcacacacaagatttgtgcttgcgcacaaacttgagatgccctgaggaacgggctagaaatggagagtaaaatgaagttttcatggagaatgattgctgcggcttttagttatgcattaggtgtattaggctggtgttatgtaggtggctataagatcctgaccggtccggtgagagaactgatccttgcacagatggcgggaagtatgtctttgggacgactggtggcggccctgatcgagggatttatatatctttcgctggcaggcggagtctggtgcattgggtatatgttaagtagtcatttcagggaagattgataaatacatagagaggaacaaaaagaaaaatggtttttagagtgccttcatattataagaattttcggtgtattgcggacaaatgtccggataattgctgcagaggatgggaaattgatattgacgaagataccctggattattataaagatctgaaaggaccgatggcagaaaaaatccgtgcgtcgatcagcgaggatggaagttttgtattgaatgaagagggatggtgcccgcttctgaatgagaaaggactctgtgaggtgtgtctgactttaggggaggattcgctttcagaagtatgcacagagtatccgaggtttacaacggagtatccgaaaacaagagaaaaagttttatgtctatcctgtggagaggttggaagaattgtcttttcagatacagaacagatcggatttgatgagcagatcctctcggaggactatgatgaatatgagtgggaagatggcgatgatgagcttgcagaaaaactcgaatcagtaaggtcgcatgcaatcggactgcttcaggatcgcagccgcccgattgcagagcgtatcgcggtgtatctgaattactgctgtcagatgcagaaagaattatttgagacagtacccaaagaggaggaaccggaaaaaatcagcctgtatgaggcatttctacagcggctgtcccaatacgaggagcttgaatccatcggtgatgcatggtctgggatggaagaagagctgaaagctttttatcatgaagaaaattatgaaaagacacatcgtgctttcatggaagcgcagatggaaaatgaatatcagtatgaacatctgatggtatattatactttccgctattttatgagggcattctacgataataatctgcttgaaaaagctcagtttgcagttgcctcatttttgatggtgcgtgatatggatgttatggtctggatgaaaaacggacagaaatttgatttacaggatcgcatagaaacaacgaaagtttacgcaaaagaagtggaacattcggaagaaaatattgaaatgttaggggaatcatttttgtttgaagatgtattttccgtaaaaggtctgcttgcacagattatgtaaaaaataagccgggtgacagggcacctgacagctttcataagctgacggcctgatcaaccggcttttagtatctgcctgtgagaaaatgcaggaaagatacaggtttttttccagcggcttttgtctcgtcgatatatttctcatagaaagaaataacttcgcaaaaagacattgccggatcgattgcatatgtcatacaatacacctccttatttgttttctataatatagcacaatgcatcgggaaaaacaacaaaaaataatatgaaagattgtacaatatatacaaaaatggaatgagcgaatgaaaaattcacaaaaacagaaaaacaacaagtgggtatttttactgatttttacagaatgaaattgtataatattacttaagaaataaaaaatgaacattttttgccataaggaacaggtaaaataaaaaaattatacaaaatatttctgacctgggaaaaggggagaatatggaacagggagaagcagtccgcagacgtgaagcggaaaagaggaaaaacgaagcgagaagaagaagacagaaaaagcggaaaaggcagcagatgtttgcgcgcagtgtgatggttctgacaggagctgtatttgtgggcgttattttgtatgggggatggcgtctgtcccacaggacggcacaggcgcaggaagagatcgtggcagaggaaacgaaatatattgcagaccgcccggatttttctgtggagcttttagactacaatgaatattcaagaccgggaacggcactggaaaaagtaaacgggatcgtcgtgcattatacggcaaatccgggaacaacggcacagcagaaccgggattattttgaaggactggcacaatccggggagacacatgcaagcagccattttgtcatcggaatcagtggggagatcatccaatgcattccatgcaatgaaattgcatatgcttcgaatgagagaaatgccgatacgatttccatagagtgctgtattccggatgatacgggaaaatttacggatgcgacttatggatcgctggttcatctggtaacatggctgatgggacgttatgatctgactacggatgatgtgatcagacattatgatgtaacaggaaaggcatgtccgaaatattatgtggaaaatgaggctgcatgggagcagtttaagtcggatcttgtcgattacatagagaccaacggtattgcaaaaacagaggaaatacagtaaaatgggtgtatcaattatgtcgaaggaagcagtatgatagagaaatattacgaagcattacaaaaaagagaaaacctccgcgaaaaccttgttgggctgcgtgcccagatcaaagatgaggcggcaaaagagcaatttgtatcgatgatcggggatggcggattgctgttagaattattagaggaagaagatccaaaggtgcgcaaaaatgtggcgatgatccttggggaactggaatggatgggggctgcagatgcacttgttacggcatatgaaagggagcagactctttttgtaaaaagcacgtatttaaaggcacttgcttatcttgacattacggcatatcaggaacggttcaaaacgagaatggaagaacttctttcttataccccggcagcagaagaaaaaaagcatattgatgaggaagtccgcgcacttggcagattgttggaaaaggcagaagaaagcacaggccacacttttacgggatttaaaaacccgcatgagatgctgctgctgacgggacatgcgcgtacggatgtgacattaaaggaaatcggggtacttccggcggatatccggagaaaaacggcgaaacatccgcttggagtggcagtgtatacaaaggatgtacgcgctatggcgaaccttagaacttaccgtgaactattgtttccaattcgtttaaaacaggaagcagaacaggcagaagtgctggcggatgaggtgtggcagagcggtattggggatttcttaaaggagtgtcataagcagggtacgccgtttcggttccgcgtggagatccgggctgatatggagaatgacaaaagagcttcttttgcgaaaaagtttgcgatacagttagagcgtgtgtcggcgagatggctgatcaattcgaccggtgattatgagacagagattcgtctgataaagaaaaaagatggaagttttgcaccatttttaaaattgtataccattccgatgcgacgtttttcctaccggaaaaatgtggtggcggcatctatccatccatcacttgcagcgatgcttgtatcgctggcaaaaccctatctgaaagagaacgcacagattttagatccgttttgcggagtcggcacgatgcttattgagagggacattgcacaaccggcaagagaaaagtacggaatcgatatttttggaccggcgatcgaaggcgcaagggagaatgcctcattagcaggggaaaagatcaattttatccatagagattattttgattttaaacacgattatctgtttgatgagattattaccaatatgccggtgaggggcagacagtcgcgcggtgagatggatgcactttatgcttcctttttcgaaaaatcaaaagaaatcttaacaccgggtggagtaatgattttttattcgaatgaagaaggcatggtaaagaaacatcttcgtttacattcagaatacaggctgatacaggaatttgtgatttcggaaaagcgtcattttagtctgtatatcgttggaataaaggggtagagggaaatggcatttttgagcaggaagaaggaagaggatgctttgaaatcagaacagatacttttggatgcaacactgatgcagaatctgcaggatcggttttgcgacgcaaataacctgtatttaagatgtcttgacaaaaatcgcacggaagtaacgaagacatatggttcaaaggaagaacttgagtatctgggcagtgtgatcgacatggacagacatatcggactgttagagaggctgttaaacagcaggatcgaaagtgtgatcgaagaggattgtggggcagacgggatccggatgtgtggagtggcagtaaaggtaagtggagaggtgtctgcgatctggatcgtgaccggcgttatggaagatgccggctgcgatgtgccggattatattatgcggacaacaccggaacgctattataagtcgatcgagtttttagagacgctgtcaaagcagatgtttgccgtcaaattagaagaacttttggcgcaggaggcatttttaaagagccgggagtcggaaatacagatggagacggaattaaaacgcaatgaggcgatgacggcaatcgtccgtatgctcgagtcggaggagggttttgataagattgttcatgatatcttaaaagaagcatgtgagtatcttggaatttcagcggctgttttattccgggaaaatatagacggcacgacggtcaacatgatcagcgagtattgttctgcgggaagagaatcacggatggaggcatcacagaacatttcaaaagaagaactgccattttttaatggaaaaccatatatgatttcggcagattcaatgatgccggaagcgttccgcagaatgtttgaagtacagaagatgaaagccgggttattccttccaatcgacgtcagcgggaaaacgggaatgtacgtctgcttttgcgaggatgaaaaagagcgcatctgggacggcggagaaatcaagtttgtcaatgatgtccgaagaatcatacagacgattctggtaaaacgcattgcaaaaaattcacttgccagttcgtatgcatcgttagaagcaatccttgaaaatgtgggatgtgggatctatgtgatggatacacaggaaaatacgatgctgtatacaaaccagcactttcgtaaagcatttggggaagatgtgcgaagtgcaggtattgaggaatgtttaagacagggagcgcaatcggaggacagcctgtatttcagggaggtttattcgaaagaagaaaaccgctggtttgatctgcacagtacaaggattaactgggtggatggaagaaaggtccttttgtgtaccatttatgatgtgacagacaaaaagctgtatcagcagaagattgagcgtcaggcaaacaatgatttcctgaccggattgtataaccggatgcgctgtgaacaggatttagagcgttatatccgtcagacgaaggagtttggcggtgagggagcgctgctttacatcgatctggatgattttaaacatatcaatgacggactcggtcatcagtatggagatgtgctgcttaagaatatttccggcagtctgcagagaattcccggtgtggagaataactgttaccgtatgggtggtgatgagttcattatcatattggcgcatcatcatatggcgatgctccagcagatcttagatgagatcaaggcgctgttcacgaaaccgtggatgctaaaagggacggattattactgtacgatgagtatgggagtcgttcgcttcccggcagacggggatacggtggaagaattgatcaagaaagccgatattgcactttattctgcaaaatgtgcaggaaagaaccgtatcgagttttatgatgacaacgtggagtccacctcttacaaacggcttgaccttgaaaaaaacatgcgcaatgccacacgaaatgctttcagtgaatttgaggtatatttccagccgattgtaaatattacaaaagagggaaatccatgtgccggtgcggaggcactgatccgctggaattcgggagaacttggactgattccgccggcagatttcattccgcttgcagagtatttaggcctgatcaatccgatcggagaattcgtcctgcgggaggcatgtatccactgcaaatactggaatgatatgggacacccggagtataaggtgaatgtcaatctgtctgtcgtacagcttttacagaacgatattgtggagcggatcgcgcatgtgatcgaggagacgaggatcaccccacagaatctgactctggaagtgacggaaagtcttgcagtcaacgatatgagccgcatgaaacggatccttgcggatatcaggcatcttggtgtgcgtgttgctctcgatgatttcggtacgggatattcatctttaaaccatatcagggagatgccgatcgatgtcataaaaatcgaccgctgctttatcattgatatcggaaaagatgatttctccaatgcatttgtaaaaatggtcggagaacttgcaacagcgatccatgtgaatgtctgcgtggaaggtgtggaaacaaaagaacagttagatgcactggtggggtcaaaggttcagctgatccaggggttttattttggaaagccgatgaaggcggagatgtttgaaagacagtacctgtaagggtactgccttttaatgttaaaacaattaaaacagttccaaaaattaaaaaaataaataaaattaaaaaaatatcaaaaaactgttgacatatttatttttatctgttattatgaatgagtcgtcgcgagagagtgattgatacgcggaagtgtcggaattggcagacgagcaagactaaggatcttgtgttcattgcgaacgtgtgggttcaagtcccatcttccgcatcaaaagatttctttgaatgacggttcgcaggagtggcggaattggcagacgcgcaggcttcaggtgcctgtggtagcaatatcgtgtgggttcaagtcccatctcctgcatttttatatgttagggtaaaagaagcattgaggattcgatgcttctttttttgaaaaaattaaaaccgtgaaaatagtacctttttcatagagaatatgcgataagattatgctaaaataaatttgtatatgtttctttacactgaagaaataaagaggaaaaggagaaaagctatatgaggaaaatgaaaacgtatgttcttggaatggtactggcatttgccatgatcctgcttccacagaatgtatcagcagcaacacagatccctgtcacggctgtggaggatatcacggatgtgatggcagtaggttctacgaatattaaggtcccgaccggagaatacagtaatgtggtacagtttagcttaaacaaaccgtcatatgtgtatgtgtctgcgtattcgacagttatgcatgaggattatgattctttaggtgcgattgaggaatttgcagtatattcagatgcaaactgttcgaatctggttaccggagacgaggtaactgttgtatgggggaatgagagaaagtcaaaatatctgtgcctcgatgctggaaattactggatttgctttgctaaaactaaaaacggtagttacaatgatgacagttatggcgagttccgcctttcagttgcagcccagtatctgaatgtaaccggaacaaagaatggttcctggggacgtgcaaaacagattaccacggataaaaaagtaactggatttttaagttccaacacaagaaaaagctggtttaaatttaaagtatccggagatacaacagcaagattgaacctttcactggagaatccgctgggagaaagtgtttttgaaagcagcaaaacaggtgtgacgttataccgttcgaaccataatgtattagagcgtatgaatattgcagaaaattattattcttctgcatgttccaaagaggttacattaaagagcggtacttactatattgaaattgcaggcagtgaagcatataaagatagctgggatccgacaaaactgaaaaacaccggtgtgaacaatatgggtgtggtaaacttaaagattaccacagtcaaaaaaaccaaaatttccaaactttccaatgtgaaaggaaagaaagca

SEQ ID NO: 5187 - DNA, 55221 bp, Unknown
  gut microbiota DNA sequence
tgttcttcttcggcaaccgacaaattgtgagaccgtgtgcctgctgggtagatgaaaaggaagcaaggtaaaaagctgttgttggaacagaaaacaaacatcacaagttttttataaaaaagattaatgaaatccaacatttcctcacattaagtcacaaactgaattaatatccacctgattttgaatttttctatagcaggatgtctactataataaagttatcaatcgattatttaaaataaggagatgatatcaattatggtagtgaatgatttaagatcagcgcttgaagtgttaagacagatggatggtcaactggtggagactgatattgaagtggacccggaagcggagcttgcaggggtgtacaggcatgtgggagcaggcggtacggtcatgcgtccgacgaaaattgacggaccggctatgatatttaacaatataaaaaatcataaggatgcgagagtgctgatcggtctgcttgccagcagggaacgtgttgcgaaacttatggactgcaggaaagaagaacttggaaaacttttgtgcagggcggctttaaacccgatcgagcctgttgtctcagaggaaaaggcaccatgtcaggaagtgatacataaagtaacggatcctgattttgacttattcaaattattcccggcaccgacgaacactccgatggacgcaggaccatatatcacaatggggatgtgctatgcaacacatccggatactggatgctcggatgtgacgatccacaggatgtgcattcagtcaaaggatgaattatccatatttctacagccgggaagcagacatatcggtgtgatggcagaaagggcgacagaactcgggcagccacttccgatttctatttcgatcggtgttgatccggcgatagaagttggttcctgctttgaaccgccaactacaccgcttgggtataacgaactttcgattgcgggtgccatcagaaagactccggtggtactggcaccatgtgtttccataaaagaaaatgcaatcgcaaatgctgaatatgtgattgaaggagaaatccagccgggaatcagagtggttgaggatcagaatacacatacgggatatgcgatgccggaattcccaggatataatgggctggcaagtcatgagtgctggcttataaaggtaaaggcggttacgcatagaaagaatccgatcatgcagacggtgatcggaccaagcgaagagcatgtgaatctggcgggaattccaacagaggccagtatttataatatgcttgagaaggcattgccggggaaggtgacgaatgtttatgcgcatccgtcaggcggaggaaaatatatggcagttcttcagtgcagaaagaccgtgcatacggatgaaggaaagcagagacaggcagcgctgctggcgtttagcgcgtttccagagttgaaacatgtgatcctcgtagatgaggacgtggatatttttgacacgcgcgatgttctgtgggcaatgaatacgcgctttcagggagatcgggatatcattacaattccaggggtaaggtgtcatccgcttgacccgagttctgatccggcttacagccagagtatttccgataagggaatcagctgcaagacgatttttgactgcacggtaccatttgaactgaaggataaatttgcacgggcaaaatttatggatattgatgaggaaaagtggaaggattttatttgatatgaaaaaaattctggtagggataagtggggcatccggagctccgatcgcgatcagactgttgaaacggctgagagagatggctgatgtcgagacacatctgatcatgacaaaaggggcagaacttaccattgtccaggaaacggattgtacagtagagcaggtaaaggcacttgcagatgtggtgtatgatgtgtcttcacttggcgaatgtcctgcgtcagggagttttaaaatggacgcaatgatcattgttccatgttcaatgaaaacagctgcgggaattgcttccggttacagtgataatctgctcctgcgtgcagcagatgtgacgttgaaagaagcaagacagttagtacttgtggcaagagaatcgccccttagtccggttcatctcaggaatcttcatgagctgagttccatgggagtccgcgttgtaccgccaatgatcagtttttatcaaaaatatacgacgattgaagcgtggacggataattttgcggaacggttgttggaaatattgggattacataatacaatgcaatcctggagcggaatgtagagagagacgcatcaggataggtggtgtaaattgataaatttgattgaaaaacagattgtactgttagacaggatcgtacaggtatccgtctgcaggacggaatgtgggatacaggtgctgatcgcaggcggggacaggtcacatataggcgctgtgagcatcgtagatgaaaaatctaatttgatctcgcatgtttttgaaggacataaggatcatgtgatcagtgacaggtgggcagttaagttgtatgaacgttttttagttccggtggtggtatctgctgggattcactacgataaaattacgccggatgggataaagacagtgattgaagaaatagaaaaactgttagaagaggtaatggcgtacgaataaaaaagccggaaaagatgaattcatcttttctgctttttttttgtgggcatagaaaatttaccgggcgtatatgtcaggatttgaacaatttatcgttgcataaatttacaaataactgtgctgtttttgaaagaggcttgtcgcagcggtagcataatgaaagctgtgatgaaataacaggcgtgataggaacagcacaccatggagcaccggtttgttttggaccattttccggaagctgaagatgaacgttcatcagcagagcgacacagttttggttggttaccatgtctaaaatggaatcaattctgtggctggtaaaaacgatatctggaataaaacctgcattctggcatgcatccattgacatctggtacatcagggaaccttcttttataaaacagaaacgatcatttttaagttgctgcagggtaatagacgaagaagacgccagagggtggctgagtggaatcagtgcaaccagatgatcactcatgtaagggatcctcaaaatgtaatggtcattgagaaagtttttttcaaaagtaactttatcttcacggttaaagatcagctcacatttttcattttccagatatgtcattaaatttacaggatcatcttctgtgatccgtacggtagtttcggggtataatttctgaaattgtgcaagaaactgagtgatgtgatactgtggcatagaaggaatcgtaccgatggtgagaagaccattttcgatattaagcattctctggatagcagaaattccttcaaattcggaacgggtaacggattttgcgtaaggcagaaaaatttctccatagtttgtgagttctacccgtcttgtggtgcgtgtaaataaagccacaccgaggtcattttccagacttttgatatgttttgataacgtggactggttcatatagagccgttcagaggcttcccaaaagttttttgtttcagcaagaacaataaactcctttaaattctcagtattcatgcagccgttctcctttaagtctgtttctgacttaattctatcggaacccgaattgtttgtcaacgcagggcaaaatataatagagatatcaaaaaaatatatcttttgggaggtaaatatggataacagaaaaaaagtgccgcttaaaaataagctggcgtacggtattggaacgggtggaggaaatgtgttcagtcagatcgcagcggcatttcttctcaattactacacagacacagcactgataggtgcaggtgccattgctacaatgtttctggtgtgtagggtttttgatggtattacggatttgcttatgggtggaattgtggataagacatctacaaggcttggtaaagcaagaccatggctcattgcttcagcgccgctttcattgttgggaattgttcttttgatgaatgttcccatgggacttggagagaatggaaaacttgtatacgcttacattacatatattttcatgagctgtattgtatacactatttatggaatttccaatacagcccttctgccactcatgacacatgataaggacgattctacaatgcttgcaacattttcagcactgggaaacaatatcataggtctgatcgcaggctcactgattacgccgcttgtattaaatcttgggtggaagacatcaagcatcattttaggttttgctgcgtgtgtccttattctgatttcaggattgctcaataaagaaatggtcaatgatgaggatacaaagaaaatggccggtattccgatgagccagcagctcccggcaactttaaagaataaatatttctggttattattgttgctcggtgcattttcacttattatgaatgcaaatgcgattggagcacagatttactattgtaatatggttttgggaaatccgatgtttatgtcagtcctcatgacagcaggacagcttcctggtatttttattcttttttttatgccggccgtttcaaagaaatggaataaaaaaacgttcctgcttatgggagcggtattgatcattgtgggatttgttattacaggtattgccggtggaaatacaacacttattgtgataggaactgtgatccgctcacttggtgtaggaccaatcctctcagcggtatttgcacttgtcccggatgtggtacaatatggagactggaaatatggtatccgttccgagggacttatttcatctgcgcagtccattggttccaaaattggtatcggtattggcagtgcactgacgggctggattcttgcatcggtaggatataatccggcggctgagccaactgcagcagtgattaatgcagtaaaatttgactatacatggatgggggctatcctcggagttgtaatttttgttattgtattattacttgatgtagaaaaatatgctgatcagtataattcgtaaggaaagaggtatgggataatatgtacgatttaaaatttgatccggagaaatatgagataaaaacctgtgaacttcaaaacaggagtgttacttacagggcatttgaaaatatcgtttattgtgcaaagccggtaagcagtgtacagaaattaaatatttatgtgccggaagcgtattatcagggaaaaacgatcaatggatacgatttaaagacagcaccggtttttgctccgaatacagtaggaggatatatggaaggtcctgcaatggaggttgggatagatccgtttaatcataaacctaatacagcatttgaagcgctactgcacggatatgtagtattgtgtgcggggatcaggggacgtaataccggtatggattcccaggaattttttgtgggcggttccggaaaagagaataccgggaaagaggaaaagttgacaggacgtgcacctgctattattgttgatatgaaagctgcaatcagatatatgagatataatgcggacgtgatcccgggagatgtggaaaagatcattacaaatggaacatcggcaggaggtgcactttctgcactggctggggcttccggtaatgcgaaggagtatgagccttatctaaaagcgatcggtgcggcagatgagagagatgatatctttgctgcaagctgttattgtccgatccataatcttgaaaatgcagatgctgcgtatgaatggctctttcagaaagaatccgtatttcatatgatgaaattcgggatgagtctggaaggtccgaaaatgatccctgttgcaggggcactggatgaggagcagagaaaattatccaaagagctgaaagcagagtttcctgactatgtaaacagcctgcatcttaaggatgataatgggaatgaacttactcttgataaagaaggtgaaggttcctttaaagattatgtaatgagttttgttcttgcatcagccacaaaagagagggcaactcttgattcacaaaacaggttaaaaggacttgctgttcccggaagtgagattgcagaacaaaattatatcacctataccggaaatgaggcaaccggtatagacgcggatgcgtatgtggcaaagattacccgaatgaagccgacaccggcatttgattcattgtccttaaacagtccggagaatgaggaatttggcgatgaaaatgtatttgcaagacattttaccagattttcggcagaacattctaaggttcatggagagatggcagacgcggataggatccgcctgctcaatcccacctggtttatcggaacctgtgatactacaaagaactggcggatcagacatggtgcatttgacagagatacttcgattgcaatccctgttatattagcttccatgctcaaaaataaacactataatgttgattttgccctgccgtgggggctgccgcacagcggtgattatgatctggaagaattgtttgcatggatcgacggtctggaaaaataaaggtctgcaattctgttgccaattgattagaacatcggtataatcataggcagagaggacggaatatttatgaatttcatctacaaaacagccacccaacaggatatagacattttagttaccaccaggatcgaagttttaagagccgcaaacaaattagccgatcaggtggacatgtccgaagttgcggcacagtcgagagactattatgaaaaagccttaaaagacggcagccataccgcaatactggtctatgacaaagaccagatcatcggcgcgggcggtatcagttatttcagggtcatgccgacctatcacaacccgaccggaaggaaagcttatattatgaatatgtatacaaatccggcataccggcgaaaagggattgcataccagacgctgaatttactggtggcggatgcaaagaacaaaggaattgatgcgatttctttggaggcgaccgagatgggacgcccgctgtatgaaaaattcgggtttaccgggatgaatgatgaaatggaactgaaaaaatcagtttaagatttgtttataaaagacaccttttgtatttacatttagacgttatcatgatgtaatgagtgaaagtaatgagacatgcttacaggaatgataaataacaaatgtagaacaagaggtgttttttatgacgataaaacagaggattttccggacaaattcacttatggtactgttttcccttgtaatcctgcttttgatcggtggaagtatgataagtatttttaaagaccggtttttagggtggtatagtgataattctaaaatatcagaaaagtatgtggatgcgtatcagaagatagaaaatatggatttttctgcaagggactgggagcagtacgctaaggcggtgcagccatatgactttcatctgatcgtccgggatgaaaatggaaaagagctttaagactggcggtaagcagttttccgtgctgtttcctgctggatgtagtatttttatcagctttttccaaactttcctcaggcatatttttgcgcagaaaatcataagcctcattgatctcctgtgcagtaaaatcataggctctggtagaaaatgcttccgtgtcaggatgtacccggtgcatcagctgtcggtatttctttttgatatccgtaagagctgttccagaggtgattcccaggattttgtacgccattgcttttgtcataaatcgagtatatcataaaagagaaaaaggttgtgggaaaaatttagacatattaaaaaccaccttttgcccctaaatcttcatggaaaatcaggaggaacacacatgagaatcataatcgtaagacatggcgatccaaattacgaactggacacattgacaaaaaccggatggagagaggcagaacttgcagcggaatacctggcaaaactgcagataaaggcattttatgtatcaccattgggacgggcacaggataccgctggatgcaccttaaaaaaaatgaaccggacggcagagacactagactggctccgtgagtttgaagcacacattgacaggccggatgtgaaaaatgaaaagtcgatctgctgggactggcttccacaggatatggaaaaggatctggatctttatgacagggagcgctggaataagacagacatcatgcgaaaaggaaatgtggaagaagcttaccggtgggtctgcgatggtctggatgcattactgaaaaagcatggttatgagcgggatgatatgtattaccgcgtgaatgagccaaatcatgacacgatcgttctgttctgtcatttcggggtagagtgtgtgatgttaagccatctgttaaatgtatctccaatggttttgtggcatgggctgtgtgcggcgccgagctcgatcaccagtatttatacggaagagcgcagaaaagggattgcaggttttcgtgtgaatgaatttggcagcacggcgcatctgtatgtggcaggggaaaaaccatcctttgcagcgcggttttgtgagtgttatggggacggggacagacaggattaaaattttgaatagctattgaaaaaaacttccccttgctttatcatccacttaacatatggaaatagtaggaaataaaacggggtgaggtttttgtctattaagaaaattgcaaaggaagcgggagtttccacagcgacagtctcgcgggtgttgaacaatcccgggtataaatgttcttcggaggaattgcgggagcggatctggaagattgccagagaactcaattatatgccaaacgaagcagcgagaaatctaaaaaagggaattacggataccagtcagaaagtgtggtatcttgatgtgctgatgacaagaacgggcaatcttgagacagatccgtttttcagtgagctgctgcgtgtcattgagagtgagatccacaggcagggatgcatactgatgcatatttttcatcagccgttgttttcgaatgacagaaaatgccggacggaaaatattgataaggtcattgcgcagatggagccggatggggacatccgcagtgatggactgatcatcattggaaaatgtaatgataatgtattgaaaaagttatcggcaaaataccggagcatcgtctccgtcaaccgcaatttaaaatgcctgaataaatataaaaaccgctattacgttccatccattatttccagtgacgatattgaggaggcacagtataccaaaccgatgctcaccacagtgcgccttccaaaggaagagatgggaaagtttgctctttatcttctgatcgaccgcctgggcggcggacataagggaatcgtccggacggagttagaaggaaaactgatgatccgggagagctgtacgttagtggagaatgcaaaccggatggaatattatatctgagagaaaacaggtcacgagcctgttttttttatgttacctaaaactatctgtgtagcgaaaaaatttacaataaatttaccagacatttaccataaggagatttcagtaacaacaggagaaagataaaatagccattgaacaaacaaaaggaaaggtaaaaaggagccggataaaaaggtaagttaaggcttcaaaaggagaaaatctacagtgggatgtcgtgtggatcgattccatgcaggcaggtgtgcttgtataccgcaagatgtgtggagcgaggcagatgtaacaaaaacacagagaactctttctgtatggtttaaaaccgtcagggggagttcttttttatttaaagattgtaaacgtttgcaggaaaataaagataattgcaaaattacgaataaaaacatacataaaaaaacgaaacaaacagtggaaaaataaggaaaataccatctgccatgcaaacgattacacaatccgtcgtggaatcgcatacaaaactggtatataaatacatcaagcaagacgtcgaagcagaaaacgatcacacagcaaaaggaagagtcgagcagatgggaacgccgacagagatttataaaaatccgaagacaccgtttgtggcgcagtttatcggagaatcagcagttattgcggattatgacagactgaaaggatttcatctgtatccgggatgcagcagggcaatcatacggccggaatttgtaaaggcggtcagatatggaacagaaaagagataccagagcctgtatgcggaaggtatcgtggaacagaaaagtagaggtcattgtataccgtctgtatgcggtggatgagaaagaagcgcatctgatacagaatgaaggattccaggaaaatgagatgttttatatataggaaaaaattctgtccggagtggcgggcattgtaaagatgacgcaggttgtagtttttgttggaaaacagggaggatgaaagatgaagaaagaaaaaagagtcatacaggtaattataaaaagtggtctgatcacatgggttctgctgcttttgatctggcagactggttcgttattttacagcgatgattttcttccgggaccggttaccacatttgcgggagcgggaaaactggtggcaagcggagagcttttccgggatattttaatcagtatgcagcgcgtgttaaaaggctggctgctcggaggaaatcggctatctgatctacacatcaagactttattataagacagactggatctttatcggtatttttacactcggtatcattggttttttagcagacaggattttgcagtttgtgggaagaaaagcattgaaacggttttgtgtgagataaaaccttgacgtttcccgcaaattgcgctatagtactctctactttgcaaaaaacagtgtagaaatggagagtactatgacattttatcaggaacttcagctcagttcgacaggttcaaaacagctcatcaaaaatacaacagacaaaaaagaaaagagacgtcatatcttaatctataactttaaggtttatctggtgatggtattctgtgtggcggttgtgaccttatacagtaaactgaccggatcggaaaacagtgtggtcggagtgaccgttcttttggcagtgctggtgctgcgccaggcagattttgggatcaaaaccacgcatggactgctatcaatcgccggtatttttggaatactgatcgcgggaccaaggcttagcaatatgctttcgcccatcccggcattctttgtaaacgtattctgtatcatgcttctgatgatcttaggatgtcacaatgtggtcatgtacaaccattctacgtttgtactcggttatctgctgttacagggatatgacgtgagcggacatgcgtatctgctgcgcgtggagggactgcttgccggaatggtgatctgtatggcgattttctataagaatcagaaaaacagaccataccggagaacttttttggatctgttccgggaatttgatctttcctctgccagaaaccgctggtatataaaactgactttcattgtttcctctgcgatgcttgtgatgtcgcttctgggacttccaagagcaatgtgggcggggatcgcctgtatgtcagtctgcctgccgtttacggatgactgcatgggaagggcagagaaaagaggcctttttaatatcgttggaagccttatttttgtggcattatatctggttcttccggaatccatgtatccgtatatcggcatgatcggaggaatcggagttggttattctgccggctatgcatggcagacggcgttcaatacgtttggggcgttgtcgatcgcggcaggattgtttggactgcagaatgcagtgattctgcgtatcggggcaaacatttttggaagtgtgtatactgtgatctgcaataaaggtctggaccggctggcacaggtggtggaacagcggaaaaagtaactgcatagagggcactcacaaaaaataaaaatcaaagaatgaatcaaagaaaatccccgtatactggaacaagggcatccgtatacggggattttagtgtgctatgcaaaaaatcagtcagcttgctgccacggggcagatcctgcttcttctggggacacatctgtattttacatttcgtctgcggtttatccagcgtaagatcccatgtgggatcaggcttagtttttccgggaaaaataatacttcctactcggcacttgcgacagcgttggcggcgacgatcgggacgggaaatattatcggtatctccacggcgatcgcagtcggcggggcaggtgcggtgttctggtgctggatcaccggtgtgcttggaattgcaacctgttatggagaatgttttttgtccatgaaataccgcaaaacggaaaaagatggaaagaggatcggcggtccgatgtatgtgttggagagaggcatgcagcagaaaggacttgcggtcttattttctgtgtttacgatattagcgtcgcttgggatcggcagcagtgtgcaggcacattcgatcagtgcggcggtaacggaacagataccggtatcgccgcatatcatcggcatggcagcgggggtgcttgcggggaaggtgatcatcggtggcagccggcagattggaaaagtatgtacctggctggttcctgtgatgagtgcattttatttaggcggatgtatttttatcctgatgaaaaattatacggtgatcccggaggcagtaaaaatgatcgtgacctctgcgtttgtgccggaggctgccgcagggggggtggttgggacaacggtgatggcggggttaagaaccgggatttccagagggctttttacaaatgaggcgggacttggctcaattccaatggcagcggcgacggcgcagcatgcatcaccgagggatcaggctcttgtctccatgacagggcctttttgggatacggtcgtcatgtgtgcaatcacaggaattgcttcggtttcaagtatgattgcccatccgggcaattatgcgggggtgccgggggagcggatgtgttttgccgtattccgggaactgccggtgtggggcgatgagatgctgtcggtttcattggtcttgtttgcgtttgcgacgatcatcggatggaatgtctatggcgagtgcgccgtgcggtatctgtttggggaaaagggtgtccgcatttaccaggtcgtttatatgatgtgcgtttatttcggcgcagtgattactcttgatgtggtgtggggcatttcggatttgtttaattttctgatggcagtgccaaatctgatctgtcttttgggactgcgccgggaaattgaaataaaagagttactgttcacaggcaggcattttctgaactgaaaatgccgtatgatacagtggtggcagcagattttgccgatttggaatgcgaagcatcggcaaaatccgttactggaacgaggtacgagtgaacagtaacataaaagatacaaaaaagaaatattaatgtttacgatactagacaaaacagaagccgaaagattataataggcagtatggtgtgcagacagcacatgtaaatattaataaggaagaaagaggtaaccgtatgtacataatacagtttatcagaggattttgtatggcacttgcagacagtgtcccgggagtatccggtggaaccgtggcatttctgcttgggttttacgatcagtttatcgactcgatcgatgatctgatcaccggaaatatggaaaaaaagaaaacagcgtttttctttctgatcaagctcggtatcggctgggtaacaggaatggttcttgcgattctgatccttgcaaatgtttttgaatcccatatttatgcgatcagttcattatttatcggatttataatttttgcaattccgattgtagtccgtgaagaattggacacactaaaagggaaatatgcatattgcccgtttgtactggttggggcagccattgtgtgtgccatcacctattttaatccggttggcggcggaaacagtgtaaatctggagcatctgacagtcacaacaggaatttatgtattcatagcaggcgcagttgcaatctgcgcaatggtgcttcctggtatttccggttccacactgcttttaattatgggactttacctgccgatcgtgacggcgattaaagatatcctgcatttaaacttaaaaagttttccgacagtattcgtattcggatgtggtgtgttagtcggtattttcagtattgtaaagctgatccgtaaggcattagagcgttttcgggcgcagatgatctttctgatcgtcggactgatgcttggttctatttatgctgtgatcatgggcccaacaacactggataccccacagcctgcaatgacgatccacaatttttccatcctgttctttatcataggtggggtagtgatctttggtttgcagcagatgaaaaaaattaaaaaataaacatttgagggcagtgtgaaaataagattttcacactcaagtttgtgcttacgcccaaacttgtcatgcgtaaagtgcagcgtaaaaatggagaatactatgaaaaagttactggtttatttaaaagactataaaaaggaaagtgtattaggtccgctttttaaactgctcgaggcaacctttgaactgatcgtgccgctggttatggcggcaatcattgatactggtgttgcgaccggggacaagtcctatattatgaaaatgtgtatggtgctggtactgcttgcagtgatcggtctgacctgctcgatcaccgcacagtatttcgcggcaaaggcggcagtcgggtttgcaacaaaactgcgccatgcgctgtttgcacacattgagagcctctcttttacagagatggatactgttggaacggcaacactgatcacgagaatgacaagtgatgtcaatcaggtgcagaacggcgtgaaccttgtgctgcgtctgtttctgcgttccccgtttatcgtgttcggcgcaatggtcatggcatttaccatcgatgtcaaagcggcactggtgtttgtcgttacgatcccgcttctttccataatcgtattcggtatcatgctgatcagtattccgctttataaaaaggtacagtcagcgctcgataaggtgcttgggatcacaagagaaaatttaacaggaagcagggtgatccgtgcttttaataaggaagatgatgaaaaagtacattttaatgaaaataatgatcttctgacaagggcgcagatttatgtcggaaagatatcagcactaatgaatccgcttacctatgtgatcatcaacggtgcgatcgtggtgcttgtctggaccggtgcagtccgtgttgataacggatatatcacacagggtgaggtggttgcgctgatcaactatatgtcacagatcttagtggagttagtgaagcttgcaaacctgatcatcaatatcaataaatccattgcatgtggaaaccgtatccagtccatttttgagatgcagccatccatcacggacggatcaggccagaaagtggataaggtgcagacggataccgctgacagatcagaagaagcagagtatgccgtggaattttcacatgtaggattaacctatgcgggtgccggagacgaatctttaacggatattgattttaaggtaaaaaaaggcgagacgatcggtatcatcggaggaaccggttccggaaaatcttcggtagtcaacctgatcccgcggttttatgacgtgacgtccggttttattaaagtggacggaaaagacgtcaaagattatccgcttgaggagctgcgtggaaagattggtacggttttacagaaagccgtgttgttccatggaacgatccgcgagaacttaaaatggggaaacccggatgcgacagaagaagatctgaaccgtgccatcacagttgcgcaggcaaaagagtttgtcgacaacaaagagggcagacttgattttgaaatcgaacagggcggaaaaaacctttccggcggacagcgccagcgtttaacgatcgcacgtgcagtcgtaaagaaaccggagatactcattttagacgacagtgcatccgcacttgattttgcaacggatgcagctcttcgaaaagccatccgcgaaatggaaggagagacgaccgtctttatcgtttcccagcgagctgcttcaatccagcatgcagaccgcatcgttgtgcttgatgatggaaagatcgtcggacttggaaccagcgaagagctgttagaaagctgtgaggtatatcaggaaatctacaactcacagtttaagaaacaggaaggaggtaagacggcatgaaaaaagtagtgacagaccagcagaagacaacagtaaaaaaagtgcttgattacatccggagatactggttttaccttggcttatcgatcgtgcttgcggcagttaccgtggcactgactctttatatcccgatcttaacaggacgtgcagtcgacctgattatcacgaagggacaggttgattttgcaggaatccttgtgatcttagagcgtatggcagtggtgattttgctcacggcagccgcgcagtggatcatgaatgcatgcaacaataagattacttacaatgtgatccgtgatatccggaaagaagcgtttgagaggatcgaacatttaccgcttaagtatattgattcccattcttatggagaggtggtcagccgtgtcatcgcggatgttgatcagtttgcagatggtcttctgatgggatttacacagttttttaccggaatcgtgacaattttcggtacactgatctttatgctgacgatcagtgtgaatatcacggttgcggtcgtggtcatcacaccgttatcattgtttgttgcaagttttattgcaaaaaagacattttccatgttcaaactgcagtctgagacgcggggcgaacagaccgctttcatcgaagagatggttggaaaccagaaagtcgtgcaggcattttcacatgaggatgaggcgttagagcagttcgacgagatcaacggaagactgcagaaatattcactgcgcgcgatcttcttttcaagtatcacgaacccggcaacacgttttatcaacagccttgtctatgcgacagtcggtgtcatcggtgcatttcttgccatcagaggaagcattacagtcggacagttatcgagtcttttaagttatgcgaaccagtatacgaagccgtttaacgagatctccggtgtcatcaccgagctgcagaatgcacttgcctgtgctgcccgagtgtttgaactgatcgaggagccggtcgagaagccggatgcagagagtgcgaaagtgttagagaaagcggacggaagcgtagaactgtcccatgtatatttctcttatacgccggaacagaagctgatcgaggatttcaacctttccgtacagccgggacagcgcgtggcaatcgtagggcctacgggctgcggtaagacgacgctcatcaatcttctgatgcgtttttatgatgtgaacagtggagagatccgtgtcagcggaacaccgatcggtgaaatgaccagaaagagcctcagaagcaattatggtatggtattgcaggaaacgtggttaaggagtggaacgatccgtgaaaatatcacgatgggaaaaccggatgccacggaggaagagatcatcgcagcggcaaaagcatcccatgctcacagctttatcaagcgtctgccaaaaggatatgataccgtgatctcggaggatggcggaagtctttcgcagggacagaaacagctcctttgtatcacgagagtcatgctgtgtctgccgccgatgctgatcttagatgaggcgacatcctcgattgatacgagaaccgagatcaagattcaggaagcatttgcgcgtatgatgaaaggacgtaccagtttcatcgttgcacatcgtctctccacgatccgagaagcagatatcattcttgtcatgcgggatggaaatattgtggaacagggaaaacatgaggaactgttagagaaaaatggattttatgcaaaactgtataacagccagtttgcaaaataaaatgtaagaaaaataagaacagccgtattttgaggtgacctgtgatcgtcagataatgaagcagcggtcagaatgcctcaaagtccggctgtttttatgaagtttatttgaaggtgtttctaagatcagtagatcatgcggtttccgctgatacattctgtggtggaagtttctatgtaatggagagcaccgtctacgtcccttgcacggacgaaattataaatggataaggcactctggtataattcctcgatgctgtattttattgcatagcgcacccacaggctgcaaacaaggtcgcggaaagaggtaaaaaacagcggcagaagcatatttccactgataaaactcagttcgtggctgaattcaaagatcgatgcagcggcatcctccggggtggaggaattttttaatttgtccagataaaaggtaagtccctcgatttcagcgtcacttgctttttcaatcgtaaggcgggctgcaaggttcataaaaagaatacgcacttcgaggatggaacggatctcatcactgcttaaagaaccgccattatatttcataatggaaactaaagtgtccatagttccatttctgcggtaatcttccacgaacgtaccaatccgtggttttaccacgacaaaccccttcttttcaagttcggcgatacctgagttgacgacggcacgtgaaacctgcatggatgaggcaagttcacgttcggatgggagtttcgtgccaatcggaagtctgccggaaatgatcatattttcaagttcggatataaataactctttgagtgatggtgcatttaatttttgaaattccataaaatttatacctctattgtgtcaaaaatatttgtggtatggtcacataccacaaataattttagggtttcccggaaaaaaaatcaagaaaatgttgtcgaaagtgttcaaaaaaacatacaaaaaatgagtgataatttttgacaatttatgacaaaatgcatataatagaactatatcagaaagaagagagagaggattgccgatgaggtctttacagtctaaatttctggctttgacggtaggatgtgtacttctttcagcgctggcacttggatatgttggttttctatatacgcataaacttgtaaatgaggattccgcacagttcatgaatctgttttgcgaggataaggcagaggagatcaatgcaacgctgacaagtattgaacagtccgtgaatatgattcaggattatacaatagaacagtatagcgaacttggaaaaaacgggatggacaaagacaataccgatgtgctggtaaagaaagtgcaggaggttgccttacatactgtgaaaaatacagaaggatcacgcggagtctatatgagagtgaatccggaacttgctggtccccagacaggatttttctggtacaaggatgaaaatggcgaagttactgaagattcccttgtcgatttttcaaaatatgcacaggatgataaggagcatgtcaactggtattatgaggcactcgaaaaagaagaggcgttctggatggagccgtatgacaataagaataaaaatgactggattatttcttatgtggtgccgatatacaggaatgaagactttatcggcgttctgggcatggatattgatatggcactgctgaaagaaaaggtggattctgtacagatttatgagagcggttatgctttccttgcaggagcagattatgtaatttattatcaccgtgattatccggaaggacttgatgaagaaaatacacatggaaagatcagaaaggtcttaaatttactgtacaaaaaaggaacacaggataatcttgtcggttataatctggatggcataaagaagaaaatgaccgccagacagttagaaaacggtatgttttttgttgtcaccgcaccgacaaaggagatcaatgcgtcgagtaaccgtattatccgattgtttttggtttcaacgctgtctatcatgtttatatcggttttaatcacaatccatgttaccaggaaaatgacgcgtccgctcaaagaacttacggaagctgcacagaaggttgccggtggtgatcttgaggtcaatatcgactgtgaatccaaagatgaggttggtgtacttgcagacagcgtgcaacagatggtaaatcacctgcggcattacattgactatgtgaatgagcaggcgtatacggatgccctgacaggcgttgccaataaagctgcatataaagagtatgtggataagttagataaacgtgcggctgatgagaagatcaaatatgcagttgtagtcatggatatcaataaccttaaaaagatcaatgacaattttggacatgaattcggtgacatgctgatcagggatgcaagcagactgatacaaaagggatttaaagaccatatcgtataccgcatcggaggagacgaatttgtgatcatcatcgaacaggccgaaaaggcaatatgtgatgagttgctgagaaattttgatgatggcattgtggttttcaataaaaacaatacaaagtatgaacagaaaatacagattgcgcggggaatcgcattttatgagccggactgcatagattcttttgcatccgtattccgtgaagcagatcatgcaatgtatgagaataaggttatgcagaaatcaatgcagactgcgccgcctgctgcgggacagtcttaggtactaaaaacagatggaggataaaaaaatgggcgatgataaaaagatggcatggaaaaaactgctaagcgtttttggtgtgtttttcctgattatggcagtatggcagattgttgtacttgagctgttgaaaaatggagtgatcggcacaatggttgcgatgatactgatctgtgctgcaacagtaatcattttcgggttagtgtttgcattaatcaggacacttttggatgttttcagacagcttatgggcgaaggcacagaggcaggaggttccggtggtgttgcagagaaggcaaataaacttgcggagaaagatggtgagatcggacagcttgtgcgtacatttcaggagtcgattacttcattttcacaggttgtacttggcattaaaaaggcgacgaaggagcttggtgaggtttcggaggatttcaaacatatctttaagagtatgacaacttctctggatcagaccgagcaggcagttaccaccattaccgataatacaatatcccaggcagatcataccgttgatatgaaagagaagatcgacgctatcagcagaacgattgatgaaattgctgaaaatgtttcgatgttagcacagagtgcagagcatatgaaagagagcaacaaagcagcagaagcaatcatggaggaacttgtaaatatcagcaaagagagcggcattgcgattgaaaatgtaagacagcagacagatctgaccaaccagtcagcgcaggagatccgtacggcaacagagatcatagccggaatttctaatcagacaaaccttcttgcattgaatgcaagcattgaggctgcaagagcaggggaacatggaagaggatttgcagttgttgcggaagagatccgtacgttagcagatcagtcaagagaatcaacagagcagatcaaccagattgtcaatacattgattgacaattcaaatatcagtgtagagatcacgcagaaggtatcagaagcgtttgtaaaacagaatgaaaagattcatgatacagaagagattttccgttcactgaatgaggaaatcaagaatacaagcgatgcggtagatggaatcagtgaagaagtaagtgcgttagatgatcataagactgtgatcgagagtggaatcacatctctgacagagtttgcggagcagaatgctgacagcgctaaagtaacgaccgagaatatggaagaattccagcagatcgttgaccagtgcaatcaggcgacagagcggattgtgacagtatcagatgagctggtaggttacctcggaaaagtaaacgcaaatgtaaaagataaaataggtggacgtaattaaaaaataaatcggaaatggagaaaagagtaccgcatgagcaattgtgcggtatttttcaatactatgagaacagaacagaaaacatcagtaaaaaacagcataggaagacttgtctttgtcggaatcagtgtcttgcttcaggtgatatggatcatcaaccttttcttatggctgaaccgttattcagcggcaatttcccttttttccacgctgatcgcagtctcagttgtctttgcaatatacggaacgcatggaaatatggcatttaaagtgccatggatgcttctgattgcagcttttccgatttttggattgtgtgtgtttctgttattcgggcgttcgaatctgacgaggagcatgaaaaaacgttatgaattgatcgatgaggaactttttccttttttaaacggtgatgatgaggtcataaaagaactgcaggaaaaagatttgtcgattgcaaatcagtcggattatatctggaaatacgggcattatccggtatatcataacacggatgtagcattttatgcggatgcgtcacaggggctggaggcacagcttgcagaactgaaaaaagcagaacattttatttttatggagtaccatgcaatcgagcaggcggaatcatttgagcggattttaaacgttttgaaagacagagctgcacatggtgtggaggtacgtattttttatgatgatgtcggaagtatcggttttatcaatcatgatttccgtaaacgcatggaagaaaatgacattgcatgccgtgtattcaatccgattattccggtattgtccgtatttatgaataaccgggatcatagaaagatcacggtcatcgatggaaaggtgggatttacagggggatataaccttgcaaatgagtattttaacattacccacccgtacggacactggaaggataccggtatccgcttagagggggatgcggtaaaaagccttactgtcatgtttcttgaaatgtggaatgccgtgaaaaaaacagatcaggattatcagaagtatctgccagagacagattatcaggcgaaacaggatggttttatccagccgtatgcggacagtccgttagatgacgagcacgtcggagagagtgtttatatgaatctcattgcacatgcaaaaaaggagatttatttcacaaccccgtatctgatcatcacagatgagatgaaccgggcactgggacttgcagcaaaacgcggggtggatgtgcggatcgtcacaccgggaatcccggataaaaaactgatctacaaagtgacacgttcttattatgcaggactggtgcgacagggggtgcgtatttatgaatacacacctggatttattcatgcaaaacagtgtgtctgcgacggggaagcggcaacctgtggcacgatcaatatggattatcgcagtttgtatcttcattttgaaaatggggcttttttgtacaactgtgatgcggtgaaggaaatgcggaaggattttgaacatatttttgccgagagtacggaagtgacagaaaaatataagagcgggcgatccgctgttttgcgtggaacccagtgccttctgcggttgtttgcacctttgatgtaaaaaacgcactttctattattcatgacaatagaatgttcgcagagtgtgcattctattgtatgaaatcttcacagaagtttaaataaatttttggtaaaagtatggtaaaatagtaattagaaggtaaccggtcaggagaagccgttacaaaataatgtttctaaggagaaagtcaaatggagtacatggatattgaaacagtcaaggaactggatcatgtttttggggacattgaggagttacagaagtttcgctgtctgatgatgcagtacgaatgtgcgatgttagaggtaaagacaaagctggatgtattaaatacagagctgtcggtccagaacagcagaaacccgatcgagtcgataaaatgcaggatcaaggaaccggacagtatcatgaagaaaatgaagcgtcaggagatcccgttttcggtggacaacattgaaaaaaatttaaatgatatcgcaggtgtccgcgttatctgctcttttccggatgatatttatacattagcggattatctggaaaagcaggatgacatcaaactcatcaagaaaaaagattacatcagccatccgaagccgaatggctaccgcagccttcatttgattcttgaagtgccgatttttctgaccaacgagaaaaagatgatgcgcgtggaagtgcagttccgtaccattgcaatggatttctgggcgagcttggagcacaagttaaaatacaaaaaagatatagacaatgcacaggtcatttcacaggatctctgcttctgtgcggagctgatctcacagttagacggcaggatgcagcagatcagggagcggctggaagagaagaaagataatacacaatccaatattaccggggtttgattcagaccccggatgatgagaaagtcgatttaaagaaactgccggtgcaaaggaaatccaggtgctatggagtgagccggtttaaacagatcagtcctgaaactccctgtaatgtttcaaaaacagatccgcaagatttccctgaagcgttaccccaagatcggtcagggtagcggagagtgcttctaaagcaggaaccatatgttctaatcttgcattttcgcccatgtgtccgatacggatcacttttccggacaattcatcaaaggagccggcaagcataatgttatattttgtgcgcatctcgtctaagatggattttgcatcggtacattccgggatatcaaaaaccgttacggtgtttgagtaaccgctctgcagatgaagttttaatcctgcttctttgacggctgccctggtggcggaaccgatccttgcatgacgctcatacagggttttatcgccggcgatcaggttaaatgcagcgcgcagaccgtagatatcgctgatcggcatggtgtaaggaaaccatttcttctcatagtaaccgtcgaaagccatcagatttgcatagaaagatgcaatcggggttttgcggtttttcattttttcttttgcatcatcactcaccacaacaaaagtaagaccaggaggtgcagagactgctttctgggaaccgccgcagagaagatcgatctgaaagtcatcgacgcagactctctcgccaaacataccggaaacagagtcaacgatcgttaaaatgccatactgtttgagcagcggacagattctgctgatatcatttaacatcccgctcggtgtgtcacagtggacaacggtggcgtaagcgtagtcgtgatgatcttttaagtattccgcgagtgcgtccacatccaaagtgttctcgtaatcggcatggtaaagttccgggatgccgccgtacatgctggcaaagtcggcaaatcctttaccgtagataccgttatcgatgacaagtactttatcgcccggctctgtcagggaagcgcaggcagcttccagtcctaaaattccttccccgtctaagatcagcgtctcatttttcgtgccaagaaggctgctgatcagctcgcaggtctctttgtaaaaatcataaaattcttcatccagatcaggatttgtgcaggcaaaactgcgcgcacgccttactgtttccggcacctgtgtcggtccgggagtcatgatcttgtacataataatctccattcttatccgtttttcaatgaaaacaacgttttcatttgcatctcaagtttgtgcgcaagcacaaatcttgtgtgtgaaaaatctcatttttcacacgaatcctcttttctgaaaaataaattatttaaaaatgattttgtttgctgctttgcgaagcggctcgataacgatcagaaccacaacggctgcaacaccgatctgtaccagatttccaggaatggaagtaaacggtgcgatccagttcccataaataattccttctgcgatatagtagccgactactttgatcacgcaggcagcaacgattgcaagtgcgtcaaagccaagaccgtgatgcttttctgtaattgcgccgactacataacccatgatggctacaatcacaaaagtgaaaggtgcccatgcagtccagccggagagcagatcaaaaagtcccatgccaatgccgccggcgagtgcaccgctttttttgccaaataaaatcgcgcagatgaaaagtggaacgttgccaaggtggatcagtccgccgtttgcggtgatcggaagtctgacattgacgaatgcggtaaatacataggtcagtgcgatgaaaagtgccgtgatagtcagaaactgtacctgaccgattgaattttctgcttttgcagctgttgtagatgttgtgctcatattcttttctcctcatttgtttcgtatgaccgatttttaacagtcatttgtttatgcctatcttaaacgcacactggtttattttaaaatgccagttaagtgaaaaatgagcagaccagtttatgtggactttttatgctctgcttcaatacaacataaaaaagagtgccggaaagccgacactcttttttaaatccattgtttacaatatcttaatctaacaaataaaaactggttctatttaaaaagaaaaaggtacatgtgaaactactgattgtgctggtagtaattattttactactgtaacgttggttgcctgaggtcctttagcgccttctactacttcgaattctacagtagcgccttcttccagggatttgaaaccatccatgttcagacctgagtagtgtacgaatacatcattgccctgctcgtcagagatgaatccgtatcctttttggttgttaaaccattttactgtacctttgttcattgaaaagtacctccaaaaaatattactggctgtatttacagctagttagagcatatcataacggttttgaaaagtaaaggaaaaaaacggatattttttaacctaatttctcaataacaatattgtggtttttgagaaaaatctcaaccagtctgtcccattcgtgctctaaggatttatcggtggaaaagatacgataggatacaccggtcgtgagcataaggtttccattctggaacttcagattcaaaaacatgccggtcacatcctgtggtgtaaaaggcgtctgcatactggcaagcgtgcgggataaattgtccggtgagagcagaaaaacaaacttaaaataagaaggtgtccgttttcccttgatcagatcaaagcagtgctggcgcactctgccgtagggcagaaacacaaggccggataacccctgttcttctaattcttcactggaataaaagtccggtgtgaccgttccgtcaaaattccacacagcatctttctggatcgtggcttcttttaataagaaatgatcgaatgtatcagagcataaaagctgattcataaaatttttaagttccgggatattgagcgctaacatgcggtatacctctttcataagctgatggtgtggtgctggagtttaaaggtggattttaatttctgcaggtatcatgatccacctttaaactccaacatcacatccccattgtaccataaaacacctggaaacaaaataaaggatgtaatctttctgattttatagtagaataggagtggttttaatcagtatgacagaaaagaggaaatacaatgaacgaacaaacagttttatttgatttattaaaagagggagtatctccggcacatgtggtaaaatcgtgtgaaaaacgtttagaggatgccggatttgaaaagatagcttatgaaaaagaatggaatctaaaagcgggtggacgttattatgtggatcaccacgataccacattgttcgcatttacgattccggaagatgagatgaaaaaagaggaaaaacctgcagtgcgcattgcagcggcacatacggattttccgtgtctgcgcattaagccgtcctgtgatgtcgtgacaaaccgctatgcacaggtcaacatcgaggtatatggaggtgcaatcttaaatacctggttagacagaccgcttggtgtggcaggacgtgtggcagtgaggggcaatgatccgtttgtaccggaaatgaaatattttgcatccgaaaagaatctgctgacaatcccgaatcttgcgatccatatgaaccgcgaagtgaataagggcgtggagttaaataagcagatcgatatgatcccggttgcagggctgcttgcagaagaagagaagaatgccgattatttcttaagttttcttgcaaaggaactgtctgttgcaaaagaggatattttagactttgaactgtcggtgtactgcaaggagcagccggagtatgttggggtagcagatgactttatatcctctccgagactggataacctgacatcctgtgcagctttagtgtccggtattttagatgcggaaagaaaagacggtatcaatctaatcgccttatttgaccatgaggagatcggaagccgcagcaaacagggagcaggttctatcttacttcacgacatgctgcttcgcattttagcggaatgcggtgcgaaggagagtgcgcaggagctgctgtatcagagtatgctgttatcggtagacgttgcacatggactgcatccgaatcaggcaggcaaaatggacatcacaaataaaccggtgctcggaagcggcttctgtatcaaggaggcatgttcccagtcctacgcaacagactgtgaggcgattgcaatcatccagcagatctgtgatctgaagaagatcccgtatcagaaatttgtaaaccgttccgatatggcaggcggcggaacacttggctctatcgcatctgcgctgctgccggtaaaaacagtagatattggtattccgcttctggcaatgcattcagcaagagaattgatgggggcagcagatcaggaggcactgacagagcttgtaacggcatattttttactttaaggaggaattttgaaaagaagaaaaaggcatacactgcttaagtttataattcttgcagtgatagcgggcggagtggttcaatattccggagtgcttaaggatacaggtgtgtttccagaaaaaatcacaaaccagatcagtgtagaacagaaaaatgcgaaagcagaaacatattccggtacggcagaggaacagacggtaaagagtacagagataagcacggaaaatgaaacagcggataccgaagtgccgcatggatatgcttatgaaacgctgacggcggagcagaagactgtctatgacgaagtgtaccggatcattctggcacatgattcaaaggtaaaagtaagtacctgtgatgaaaaagttttagagaaggcatatcgttctgtgatagcagatcatgggggcattttctgggtatccggttataactacacacagtataccatgggaaaaaagattgtcagcatcgatttttccccaagttatacgatggagcgcacagagcgtgattcctatcagaggcggatcgacgcagtggtggattccatattaaaaaatgtggatccatcctggggagattatgaaaaggcaaaatatgtgtttgaatatctggcgggaaacgttgaatatcaaatggggacggaacaaaatcagaatattatcagtgtctttttaaataagaaaacagtctgtcagggatatgccaacgccacgcagtatctgctgacacttctggggattccggctgttgtggtgacaggaactgcggagggagacacacacgcatggaatcttgtccagcttgacggtgcatattattttatggatacgacatggggaaattcttcctataacaatggtgcgagcggtatggggacttttatcaattataattatttcggggtgactacggctgagatcagcaaaacgcatcaggcggacggtacactgcttttgccggaatgtacggcaacggcagataattattatgtaagagaaggaaaatatatcaccgagtgggagccggaagtgatcggacagatttatggcgctgcttatcgtaatggagctgtcacggaggagattcgtttttcggatacatctttatatgatcaggcaaaagcatatctgatcgatgaacagcatatccgcgattattgtgagggaattacaggattatcgtatattgaggacagagatcagaatgtactgatcctgaaattttcgtagaaaagatatcagataaaaaatatataaaatataatagaaacctctatacaaaacaaagtttttgtgctaatgttatgtagtaattgatactacatgtaatggaaaaaaataacatataaaaagtttttgaataacaaattgtcggactatggaggttataagatatgtacaagatcgtgattgacagttgtggagaactgccggaagatttaaaaaaggatggacattatcagaatgtatcgttagagttagaggtagatggatgctatatccgcgatgacgagacatttgaccagaaggattttcttcgcagggtaaaggaaagtgttaccggaccaaagtctgcatgcccgtctccggatgaatatatgaagtcctatgaaggggatgccgatcatgtatatgtggtaactttatcaggcaagctttccggatcttataacagtgccgaacttggaaaaaatttatttgaggaggaacatccgggcgagaagaagatttatgtattcaattcccgttccgcttccgtcggtgagacactgatcggtatgaaagtgcaggagtgtgaagaggccggtatgagttttgaggaagttgttgcggcaacagagaaatatatcagttccatgaatacattttttgtacttgaaacattagagactctgcgaaaaaacggacgtctgacaaatcttaaggcatttattgcaaatacattaaatatcaagccggtaatgggttctacagaggaaggatcgatctgtcagcttggtcaggcgcgtggcatgaacaaagcgctggataagatgattcaggatgtgattgcaaagacaaaaaactgtgagaacagggtgcttgcaatttcacactgtaattgtccggagagagcaaaagcagtaaaggaaaaaattgaaaagatggcaaagttcaaaaaaatcattgttacggatacagcgggcgtcagcacaatgtatgcaaatgacggcggtgttattatcgcagtttaatacggcggaataagtgtcagttaccgatctgccggcgtatgaggactgcagcatccgtcagggaaaggacagtatatgaaagaactgacatatgaggaagtattagatcagatcgaacatcagagacggtttggaaatcgtccgggggcagaggtatcagcgctgatgctggaaaagttaggcagaccacagcagaatatgagtgtgatccatatagcggggacgaacggaaaaggttccgtctctgcttttttgtgctcaattttaaaggaagcagggattcgtaccggaatgtttacctcaccgcacctggttgatttcagggagcggatctgtgtggacggacagatgatatcctgtgaagaagtgacaaaacttggaaacatgttgcttgaggaggactttgggacagtaccgacgatgtttgattattgtctggcaatggcactgctctattacagggacagacagtgtcaggctgtcgtgatagagaccgggcttgggggaagattagattcaaccaatgcaatcggcgtgccggaggttacggtggtcacgaaaatcgggtatgaccatatggcggttttaggtgatacattagataaaattgcggcggagaaggcgggaattatcaaaaagggtacaaaactggtattagagagccagaaaaaagatgcaatggatgttttgctggaaacagcggaaaaagaagcagttactgagataaagattgcggatatgcatgacgtgaccgaatgccgctatgaaaatggcagacagtatttttcctaccagaaatataaaaatcttgagatggcaatgcttggtgtccaccagtatgaaaatgcggctgctgcgatccttgccgcagaaatttttctgaaagacagaggaatttcagatgaaaaggcagaatactatatcagagaaggaatcaaaaagacaagatgggaaggacggatggagatcctaagccgggaaccgttttttatggtggatggtgcacataatggtaacggagtggcggcattagcggaaagtcttcgtactttgttcccgggagagaagtttcattttgtcatgggagttatggcagataaaaactatgaggaaatgatcgaggaattactgccgcttgcactggattttaagacggtgacggtagagtcagagagggcactggcggcacaggagctgtcggagaagatccgggcaaagggaatctgcgatgccggacttttacactcttttgacgaactgatgccgggacggctggatgtggcacacaaaacgatcgcatttgggtctttgtactttgtcggggagattgaaaaatatttccaagatgtaacaaaaatcacaaaaaatttacaaatttactaactttgcttaacaggtggttataaggaatttttttggctataataatcggtgttgaaaaataatgtggattagaaagagctgataagatggtatttagcagttttgaatttttattccggtttttgccgttttttttactgatatattatgtgacaccgcagaaatggaaaaatgcggtgttatttgcgggcagtattttattttatacggcaggtgaggcagaatatgtagtgcttttacttgcttctgtggtgatcaactatgtttttggcaggctgatgtaccgggatacttatgagggaagagggaaaaaacagctgattttgctgatcgtggcgctgtgttacgactttggtgttttattcctttttaagtatagcggtttcatggataagctgccgctcggtattagtttttatacgttccagattgcagcctatatcatcgatgtttaccggggaagggtgccggtggaaaaatcgtttatccgacttggaacgtatgtgacgatgtttccacagctgattgccggaccgatcatcaactattcggaggtccgtatggctttatgcagcagaaccgttactttcgaacagtttgaatccggattaaaaatactgatactgggacttggtgcaaaggtgatcgttgcagaccgtattggacttttgtggaataacatccaggcaatcggctttgaaagtatttcaacaccgttggcatggatgggagcgtttgcatattcgatcgaactttattttgatttttccggttattctctgatggcattgggactgggacggatgcttggatttgaatttccgaaaaactttaaacatccctatatttcaagatcggtatccgaattctggagaagatggcatattacgcttggacgctggttccgggaatatgtctatattccgcttggcggcaacaggaagggaaaagcgcgtacgatatttaatttatttgtggtatggagtctgactgccgtctggcatggggcagagggacattttctgatctggggagcatcactgctcttactgcttgctttggaaaaagcatttttactgcagtttctgaaaaaaagcaaaatactttcccatgtatatctggtgcttgtagtaccgcttacctggatggcatttgcgattgcggatgtaggacagcttggtgtctattatgcaagaatgtttccatttttcggtgtgggagaaacggtcagacagatggattttttgcagtatctgaaagattacggtccactgtttctgatggggattgttttttcaactccatacccgacagctttatataaggtatttgaaaaaaaatggctggggagtctggcggtgatcgtggtgttaggattaagtctttattatatggcagtttctacgaataacccgtttttgtactttaatttttaggactggtgaataagcgtgaaaaaaataatgaaatgcagggttgctgtctttttgatcattggctggggggtactttccctgatcggatatttaaaaaaagacgggatctataaaaattattccatcgatgtaaaaaaaactccgtattttgtattggtgttagacggaattcatgataaaatttatccttggagtaaagagttgccggatctgttgccggatggaacaaaaccacagaaccaggaaagtgtcattgcaagtacagaaatgacggatgaggaaaacgtggcagggcagacggaaacagtaatgcaggatacagaaacggcggctgcaaaaccaaagaaatttatacaggtggatgacagttattttgatgatgcagtttttattggagattcgagaacggtaggtctgcatgattatggtggactggatcattccgattttttcgcaactgttggtatgaatatttatgatctgtggaaagatgcattctgtgaggtcaacgggaaaaaggtgacattagaggaagccttgaaggcaaagcagtataaaaaggtatattttcagatcggtatcaatgagatgggacgtggaacactggacgggtttatgaatgagtatcagaatgcagtggagaaattcaaaacactgcagccggatgcggtcatttatgtgcaggcgatcatgcatgtgacccagaaaaaatctgattcagatccgatttttaataatccgggcattgatgcgagaaatcagcgcatacagcagcttgcggatggtgttcgtgtgttttatattgatgtcaatgaagtggtgtgcgatgatcagggtggattaaaacaggagcttacgtttgacaatctgcatctgtacgggtcgaaatacaacatctgggtagatttcttaaagaccaaaggaatcgggacagaatgatgaagttttgggaagactggaaagaaaaactgaaaaaatttttgaaagcggatgtgctggcagaatgcaggcagcaggtggatcatgagaacagagtcatgctctgtgtcttaaacagttccatggtgtgcctgtcatttatgctggcattttacatattatggagaaaacaggcagactattaccatgaacatatgtgtattttatatgcagcattgtttctgatcttactgtttgtttccttttattcgaaaagagattcaggtatccgtttgtctgttttgatcgcggtcgagtacgttgcaataggttcctgttttgccatgaatcatattatatttggtggacgggaaagcacaacggcatattatcttctggtgggacttgcattttgttttctggtgcgtcccatccagatgtatctgatgcaggcggggatcacctgcatactggcggtcagtatgcgcttgattcacaggctgaacaggatcaatatgaaggtgagctgcaatgtctggccgaccgcgtggaaacgccggaagaaaagaagcggttgtcagaagctatggaattgtcgaatatccgtgaacatttaaaatcacagaatgtgtatatcgtagaggttccgctgcgttcgaaaaatggaaagtaccgtcagaaacagatccgctgtatgtatttaaatcaacagacaggtacactgcttttaatgctttccgatgttgaggacattgtgaaagaagaaaaagaaaaacaggagcagctggagaaagcactgaagatggcagaggcagccaatgaggcaaaaacgaaatttttagccggaatgagccatgagatacggacacctatgaatgcgatcatcggtttaaattccatgatacgctcatcgcttgatgacagggagcaggtgcttgattatacggaaaaactggattcagcatcccaatatcttttagcactgctaaatgatattcttgatatgtcgcgaatcgagagtggcagcatgaaacttgctatccgggcatttgagggagataagttctgggataatgtcaatatgttagcgaaggcacaggcagtcatggcaggtgtcggctattcttttgaaagaagaaagaaaatctcggaagtgtatattggggattccacaaggttagaacagatcatggtaaatctgatcaacaatgcggtgaaatttaccccaaaaggtggaaacgtcaacgtctctgttacagagaaggaagtggatggaagagtacagctgaccgcagtcgtttccgataatggaatcggtatcgcaaaagattttctgcccaaagtatttgatatttttacgcaggagcatgaagaaaatacccgtgtttatggagggagcggtctgggactgtccattgcgcgcaattatgcaaggatgatggatggtgacattacggtagagagtgcggaaggaaaaggaaccgtgtttaccgtgaccgcaaaacttgattttgaccgccggaaaaaggcgcggaaggaaagaacagagaatatcagttttgagggaaagcggattctgcttgttgaggatcatccgcttaatgtcatcgttgcaaagggacttttggaaaagaaacagtttgaggttgtcacagcggaaaatggcaagaaagcggtggaacttgtgacagatgccccggaatattattttgatgcgatattgatggatattcgcatgccggttttagacggaattgaggcagcaagacagatccgtgctttagacagagcagatgtcaaagaacttccaatcattgcaatgacagcaaacgcaggagatgaggacagaagacagacgaaagaagcagggatgaatgaacaccttgcaaaaccgatcgatccgaaacttttatatacgacgctgcaaaaatttattttaccgtaaaaaagttataaatgattccccgattacacatactacggaaaaagattgtgtgaaaggggaatttttttatgtcattaaaaattaagatcacagatgtgcatgcaagacagatattggattcaagaggaaatccgacggtggaggtcgaggtgactgccgagacagagacaaccggcaaaaagatcacggcgagagagtctgtcccttccggtgcaagtacgggaagatttgaggcaatcgaactgcgtgatggtgataaagattatttcggccttggtgtgcagaagaccgtggatcatgtaaacacaaaaatccgggaaatgctgcttgggatgaatgtgttagagcaggcaaaattagaccgcacaatggtggaacttgacggaaccgataataagggaaaccttggggcaaatgcgatcctcggggtatcgcttgcctgtgcaaagacggcagcaaaggcactggatatgccattataccgctatcttggcggaaccaatgccaaaacgctcccggttccgatgatgaacgtgatcaacggcggtgtccacgcaaaaaatacgcttgattttcaggaatttatgatcatgccggtcggagcacgcggtttctcacaggctcttaaaatgggtgcagaagtatatcattttctgcgccagatcttaaacgaaaacggtatgagtacagcagtcggggatgagggcggttttgcaccggattttaagaatacgggagaagcgttttcttatctctcaaaagcggtggaaaaggcaggttaccgtgtcggggaggatatcgtttatgcgatggatgcggcggcgagcgaactgtatgacgaggcgcgcggcgtctatgtatttccgggagagtcaaaggaaaatggggaagaacaggagatcgcaagaagttctgaagagatgatcgccatgtatgaggaactcgtgcagcagttcccgatcgtttctatcgaggacggattgttcgaagatgactgggaaggatggcagaaactgacaaagagacttggtgataaagtacagcttgtcggagatgatctgtttgtgaccaatcccaaacgtatccagtgcggaattaaacttggtgctgcaaatgcagtccttgtcaaagtaaaccagatcggaaccgtgacggagtcgttaaatgcgattgagatggcgaagtcagccggatatcatacggtcatttcccatcgctccggggagacggaggatgcatttatcgcagaccttgcagtggcggtcaatgccggacagatcaagacgggagcaccgtgccgcgcagagcgcaccagcaagtataaccagcttttacgcattgaggaggaactggcagaggatgcggtgtttgtgccggaagaaatcactgaaaagcagaaagctgaaaaaataggttgaaaaaaggaaacgtctatgttacaatgattaaagttgtgagtttgtaacctaggagggaacgatcgtggcagttgtaaaaacaattttgactgtagtttttattataatcagtgtggcattgacagttatcatcttaatgcaggaaagtaaatccgcaggacttggagcaatcgcaggtgcagcagacacatattggggcaagaacaaaggacgttccatggaaggtatgttagtaaaactgaccagaatttttgttatcttgtttatcgtgattgcagcggtattaaatatgagtattttttaagatgaatggatggctgtcgcagatgcggcagtcatttttttcataagaaaaaaggacggggtttatggagaaaacaattttagaagaacggaaaaagacaatttaccagtttatctgcgatgagttttatgtaccgatgaaagcaaaggagatggcagtcgttttatcagtaccgaaatcccagcgcagtgaactgcaggaagtacttgatgcgcttgtgatggatggaaggatcgaggtgacttccaagggaaaatatatcaaatcagaaggaaaatacttaatcggtacatttacggcgcatgcaagaggttttggatttgtcagcatcgagggggaagaggaagatatcttcatcccggaatcacaggtgcatggtgcgtttcatatggatacggttcaggtggcggttacttctgagaatagtgggaaacgcagggaaggtacgattacaaaaattatatcccgcggtaccacacgaatcgtatgtacttatgaaaaaagtaagacgtttggatttgccgtgccggacaatcctaaattcggttcagatatttttattccgcaggagcgttcgaaaggagctgtcagcggacataaggtcgtggtcgagatcacggactacggcaaagagggaagaaaaccggaagggaaagtggttgagatcattggtcatatcaatgatccggggacagacattatgtctatcgtaaaggcttacgacctgccggtagaattttcagaaaagatcatgcatcaggtggaaaatgtctcgaacgatgtcagcaccgcagatatggcgggacgcatggatttcagggactggcagacggtcacgatcgacggggaggatgcgaaggatcttgacgatgcgatcacattgacaaaagagggagataactataagcttggcgtgcacattgcggatgtttcaaactatgtgcaggagcacagcgcactggatgtggaggcattatcccgcggtacatctgtttatttagtcgaccgcgtgatcccgatgctgccgcataaattgtcaaatgggatctgttctttaaatgcaggcgaaaaccgtctgaccttaagctgtgtgatgacgatcgatacaaaaggaaatgtgatcgatcacacgattgcagagtccgtgatcaaagtagaccgccgcatgagttataccagtgtgaaaaaaatccttgaagatcatgatgaaaatgaaatcagagagtatgaagaactggttccgatgtttgaactgatgcaggaactggctgcgattctgcgcaaaaaacgtatgaagcgcggctcgatcgattttgattttccggagacgaagatcgtgctcgatgacaagggaaaaccggtcgagattaagccttacgagcggaatgttgcaacgaagatcatcgaagatttcatgctgatcgccaatgaaacggtagcgcaggattatttctggcaggaactgccgtttgtataccgtacacatgacaacccggatactgaaaaaatcaagaagttatcgacatttatcaataattttggttattctatccatatcggacaggacgaagtgcatccgaaagaactgcagaagctgctgcaaaagatcgatggaacgccggaggaggcactgatcagccggctgacactgcgttccatgaagcaggcaaagtatacgaccatgagcaccggtcattttggactggcaacaccttattactgtcattttacatcaccgatccgcagatacccggatctgcagatccatcgtattatcaaggacaatctgcgcggacggatgaatgcaaagaaaatagagcattatgacaagatcctgccggaagttgcgaaacattcgagcgagatggagcgccgcgcggatgaggctgagcgtgagaccgacaagctgaaaaaggtggaatatatgtcagagcgtatcggtgaggtgtttgagggtgtgatctccggcgtgaccgaatggggattttatgtggaacttccgaatacggtggagggactcgtacatgtgacaacacttgtagatgattatttccattataatgaaagtacttatgagttggttggcgaggtgacgaacatccgctataaactaggacagcgcgtacatgtcatggtgacaggaactgacaagatactgcgtacaatcgactttcgtgtggtgcgggagaatgaggaagaataaaaaatcatcttgcgttccccggcatttcggggtatactatacaggctggatattggataagaaaggaagggcatgatggcaaagacagaaaaaaaactgattgcgaacaacaaaaaagcctaccatgactttttcttagaggagcgttatgaagctggcattgagctgcatggcacggaagtaaaatccatgcgcatgggaaaatgcagtatcaaggaagcgtttatccgtatcgagaacggagaagtcattatttatggcatgcacgtcagtccctatgaaaagggaaatatcttcaaccgcgatccgctgcgtccgaagaagcttctgatgcacaagtcagagatccgcaagctggtcggaaaaatcgcagaaaagggttatactttagtgccggttgaggtatactttaaaggaagtcttgtgaaagttgatattgcgcttgcaaaaggtaagaagcagtatgataagcgtcaggatattgcaaagaaggatatgcggcgtgaggcggagcgggatttcaaagtaaagaatctgtactaaagaaatttatggaaaaagaatggatgatgtggtctttttgattcacaggaaatgatatcttgtgtatgaaagggctgcatctgaaatatatatttatgggcttgtaatggtttcgacagggatcatgaagctggagaagcgagtcgcacgggatgcgtcaaattccaaaattaaaattaaacgctgaagataatttagcatacgctgcctaatggcagcagtctgacctagagcactcacactttaggacccaggcttcgactatgtgagaaacgacgcaggcaaagctttgagcctgcgggcgtacgatgaagctactgaaaccggaactgtgcctacgcaggtctggcagagggaatgttaaaacataggatacgctcgtagaaggacaggggattggtttttggacacgggttcgactcccgtcaggtccactcgtaaagtgccgtatttacggcactttttaaattttgtgttgcatttcgtgacatattttatgtcatactgatataaaataaggaccaccattgaaggaagtcctgatttattcatgacaatagaatgttcgcagagcgtgtattctattgctttaacagctctgtaatgttgatcgtcagatcatcgtaaatacatacctgtatatcgtcatcaaaactgtacagatctgtcagttcttctttttctaaatcataaacatttactgtcctggtcagtggatttacgatccagtattcacgtacaccggcagagtggtatttgaataacttcacaccgtaatcaattcgtttcgtacctgaagacgcaatctcgatgatccagtccggtgcaccattatatccacgatcatccagcttagacttgtcacaaataatgctgatatcaggttcaacgtatgttttatcatccttattcagaaaaacggcgaatggggcaggatagaccttacaaaatccatagtttttactgatatactcacggatttctgcggataaattcataacaagttcctgatgcaatctgtttggtggtgccatatcataaataacaccatcgatcagttctgcacgctgtccttccgggagagaatagatgtaatcggttgtgtaggtgttttcttttgaaaatggcatagtgtatacctcctttacattttgatgatggctgtttgacaaaaaaatatatatgacatataatatacttaacgaggcagccggaaggtgagtgcacttcacccgacccggcgaatttaatactaagttatcaagagatagccgttcctaaactttaccagagagcaggacggctatttcttatgttttctgtgggtatctatgtaagtcagaatcgccatcaacatgatgacaaaagtaaataagtcattccatgaaaccataataatcatcctttccgtaaggctcggatcagatgagagcacgtcctccagctgcctgggtaagcatattatgttgtcgagaggccattgcaaatatagtatcgataatagtataacttgtgttaatgttgtctgttgagataaatatataaatttctcttttatatttaacttgtagtattacgttgattttaacatatttgtaatagccaggcaatgatattatactaattgtagtgatatatgttatccgcatgttttatttgagagttacacattactgtgtatttttctatttcatatggagaaagtcgtttttgcagggctttattagttgtttgttttaaaggcttttttcggcaggttcatggattgcatgactggtggaggagaagaataggcagttgagaatggtgtgagaaaaatatagagggtttgcacgttgaagaatgttgtagtatgatagcgttgccatgaaaggaatgataaaatatatgaagaaagttcaaaaaaatagctttgagaagatgtgcgatagacttgaagaaaattttgttttgaacgagaatgaaattaagtatgtaaaaaaacatctttacccaataaaagaggataaggatatgcttttaaaacttaaggcagaggcattagaggatgattatatagctgtaatgtcgtttgcaattacaatgttggcattgatggtagcagtaataactctatgcgttactatgctatcagaaataggaatgccggctaggtgggtattattcctgatttatagtgtgttactagtgtattattttgttactataaaaaacaaaatgcgatactttaaaaatgtaaataaatggcgacagtatattttggtttgcatagatgaaatggtaaatgagcaaaataaaaagaaaaagaagaggcataaatagagtcagatttatcttaacagctctgtaatgttgattgtaagattatcgtaaatacatacctgtatatcgtcatcaaaattgtattgatctgctggggatgcaatctcgatgattcagtccgatgcactgttgcatctgtggtcattcaacttagacttgttacaaataacgatgatatcaggttcaacgtatggtttatcattcgtatttagaaagacagcgaatggtaccggaaactgccgggataaaagaaacgccgattcctgaaaaatcaggaatccggtgaatttgttttttcgcagacagcatttcttttttgtggcggatgtgatcagtgcgattctgctctaccggagtgcaaaaaaggaaagaagcacatctcttaaagattctccgctattttaatgcttagatccatgtaaatgcagcggttttccggcagttttccggtcagcagataatctaccaaaagggagagggagcgtgcaccctgctcatccggctgttggcagattgtggcagagattacgccgtttcgtatcatttcacaggtcgatagaacagcatcaaatgtaatgatcttaagaggacgctgcagggatgcgtttaaaactgcacggcatccaccatagacgccggctgctgtaaaataaagtgcagacagatccgggtggcggtctaagaggtcagaaactacttcgtaactcttataatcatcatcgccattttccacgacatccacaatgcggatatttggatgctttgtatgaagatgggaggtaaaaccgctgatacgttcttcgtggcagagaacattgtgagagccggtcacgataccgacacttgcataatctccggaaaacagatgcaataaccctgcggcggtctgcccgcatttgtggtagtcgctgccgacataggcaatccgtttcgaatcaggcatgtcggtgtttatcgtaatgcaggggatgccgttttcccagagcaaatctatcttttcctgtatggcaggatcattgtagggagagaggatcagtccatggatctcttcttttagcagttcatcgatcgtctgaagctgactttgtaaatcaaaagaaatacggcgttcaatcacggtacatccgtaaatggacagttcttcaagtttttggcgaagaccgtccatgacctcatcaaaaaacggattttctgcgccgaaaagcaggacaccgatttttaattttttcttttgcgctgcaagcgcaataccagccttgtttggctgatagtctaaaagctttgcaatttctaaaactttccgttctgtctcggcgttgacaatgccgcggtgatttaacacacggtccacagtgccgcgtgaaacaccggaaagctctgcaatttccttcatggtagccatagaaaaacccctttttatttcaattgattcactttgatgccaacatcattcatacaaataaagataacataaaaaacaatacattgtcaacttgtgtgcatgtgcacatagatgggaacaggaaaaagaagtgttctacgaatcggatggaagtgcagatgcctgaaataatgtgaaaaatgaacgtataagtaaatgtaaacaaaaataaatatgaaaaaatgtacaaaaagtatattgcaaaatggtcatcccggatgtatgataaataaaacgtgcacgagcacacaatgaagtgatttgtaaaaaggagagcggtatgttgtacataggaattgatcttggaacatcttccgtgaagctgcttttaatggatgcagccggaaatgtaaaaaatattgtatcaagagagtatcctctttatttcccgaatccgggctggtcggaacagaaaccggaagactggtacaaagagacgatgcaggggttaaaagaacttttggaaggttttccgaaagaagaagttgccggaatcagttttggcggtcagatgcatggactggtaattcttgatgacaaggatgaggtgataagaccggcgatactgtggaatgatggcaggacaacagaggagtgcgattacttaaataatgagatcggcaaagaaacattgtcagaatatacggcaaatatttcatttaccggttttaccgcaccaaagattctctgggtaaaaaacaaagagccggagaattttgcaaggatcaaaaagatcatgctgccaaaagattatcttgcatataagctgaccggagagcactgtacggatgtttcggatgcgtccggtatgctgcttttggatgtgaagaaccgatgctggtcgaaagaaatgtgtgaaatctgcggtattacgaccgacatgctgccgaagttatatgagagctatgaatgtgtcggtacggtcttaccggagattgcaaaagaactgggcttatctgagaatgtgaaggtggcagccggtgcgggagataatgcagcagctgcagttgcaaccggaactgtcggagatggaaaatgcaacatttcacttggaacaagtggaacgatctttatttcttctgcaaaatttggtgtggataagcacaatgcactacatgcattctgtgatgcaaatggagcttatcatctgatgggatgtatgttatccgcagcgtcctgtaacaaatggtggatggatgagatcatcggaaccaaagattacaaaaaagagcaggaagcgatcacaaaacttggcgaaaaccatgtatactatctgccgtatctgatgggggagcgttccccgtacaataacccgaatgcgagggccacttttattggcatgacgatggatacgacaagagcggatatgacccaggcagtgttagaaggtgttgcatttgcactgcgtgattcctttgaagttgcaaaaacacttggtattccgatcgagcgcactaagatctgcggaggtggggcaaagagtcctctctggaaaaagatcattgcaaatgtattaaatatcaaagtagatgtgcttgagacagaagagggaccatctttaggaggcgcaatgcttgcagccgttgcatgtggtgagtacaaagatgtggaatctgcagcagccgcaatcgtaaaagtggtcgatacggtggagccggatcctgaacttgctgcaaaatatgaggcacgctaccagcagtttaaaaatatttatccggcatgcaaagatctgtttgacaagatcatctgacggacaggaaagggtattgttcctgactgttttgaatagtaacagccggataccagaaaaaatttgcttatgcaggaaagaaaacctgcagggcaaatgagatagaagataagaaaagagggaatagagcatgcagatttatgaagttacggatacgcgtttccgcaaatatgggaaagtaatccggaatattgatttttcagcattgacggaggcaatgaaaaagacgccggttccatctgatgtagtttacgagccgtcgatcgcagaattagaggcattgccggtggcaaaggagattgagaaagtcttttacggagaactgccgattcagatcggatactgtaatggacacaatgtgcttttaaatgcagtggaatatcaccgcagctcagagatcaatcttgcggcaaccgatgcggtcttaatattaggttcagaggcagatgtgaccgatgattttacctatgagacatcgaaaatggaagcattccgcatcccggcaggaacagccgtggaggtgtatgcgaccacactgcattatgcaccatgtcatgtggacgatgcaggattccaggtggcagtcattctgccgaagggcaccaattatccgttggatgaggcacacgccggcggggaggatgcacttcttacagcaaagaataaatggctgatcggtcatgccgagggcgggctgccggagggaagtcatatcggactcatcggcaaaaatttaaatgtcagagaataaatttttatagaaaaaatgaagtatgtacagaaaaaaagaaagcggaggaaaacaaaatgaataacattccagaagtaaaagttggtatcgtggcagtcagccgtgactgcttcccggagtcattatctgtaaacagaagagaggcattggtaaaggcctacacagataaatacggtgcagcagatatctatgagtgcccgatctgtatcgtggagagcgagatccacatggtacaggcattagaggacatcaagaaagcaggatgtaacgcactctgcgtatatcttggcaactttggaccggagatctccgagacactgcttgcaaaacatttcgagggaccgaagatgtttgtcgcagcagcggaggagacacaggacaacctgatccagggacgtggtgatgcatactgtggtatgttaaatgcaagctacaacttaaaattaagaaatgtacatgcatatattccggaatatccggtaggtgacgcagcagactgtgcagatatgatccatgatttcctgccgattgcaagaactgttattggattatccgagttaaagatcatttctttcggaccaagaccgttaaacttccttgcatgtaatgctccgatccagcagttatataaccttggtgttgagatcgaggagaactctgaactggatttgtttgaggcatttaacaaacatgcaggagatgcgcgtatcccggaagttgttgcagatatggaaaaagagcttggcaccggaaataaaaaaccggagattcttgcaaaacttgcacagtatgagctgacactgaccgactgggtagaggagcacagaggttaccgcaaatatgtagccatcgccggaaaatgctggcctgcattccagacacagtttggatttgtaccatgctatgtaaacagccgtctgaccggacgcggaatcccggtttcctgtgaggttgatatctacggaacactgagtgagttcatcggaacctgcgtgagccaggatgcagtaactttacttgacatcaacaactctgtaccgaaagatatgtatgaagagtccatcaaaggaaaatttgattacaaacatactgatacattcatgggattccactgtggaaatacctgctctaagaaacttgcaagctgtgagatgaagtaccagatgatcatggcaagaagccttccggtcgaagtgacaaacggtactttagagggagacattgcaccgggcgatatcacattctaccgtctgcagtctacatccgacaataagatccgcgcatacgtggcacagggcgaagtacttccggtagcaacacgttccttcggttccatcggtgtatttgcgatccctgaaatgggaagattctaccgccatgtactgatcgagaaaaactatccgcatcacggagcggttgcattcggacattacggaaaagcactgtttgaagtattcaaatatcttggcgttccgatggaagatattaactacaatcagcctgcatccctgccatatccgacagagaatccatttgcataaaatgtacataaattaatatattacctgaaacccgcgcatctaaaacgtaacataccgttttggatgcgcgggtttttgtgtgaaagggttcgggtgtcaaaaggtggtttttattttttaacacccgaacccttccacataacccctgccatagaaactggaaatatctacttgtagaatcgcacatcatcctctgttacaatgcagatacgtcaaaatgaaataaatatgtaatatttacttaacaaaaagtaaatatctgtaaatggaggatttctacataatgaaaaaaagaaacaagatcgtagcatttttactggcaggagtgattgcagcaggacatggcagcgtggtgtatgcggcagggtatggaagtgtggtgtatgaagatgtggcatgggatctgtgtgcgctgaatgaagaacgcatgaaactggaagtacaggaaaaaaatacagacaatgatgctgctgggaatgaccaagcagacatcgaagaacgtgaatcaccgcagagtacatctgaatatgctgatatcggtatcgcatccgtgttaaattatgtgaatttacgcgcggaaccttccgtggaaagtgaggcactcggaaagctgtacaataacagtgcggcaacggtgttggaaacagttttggatgaggcaggagaggaatggtatctggtcagttcaggttcggtggaaaacgcttatgtgaaagcggaatatgtaaaggtcggggatgaggatctggcgcggggtgtcagcacacgatatgcgacggtaacgactacgacgttgtttgtgcgtaccgaaccgggaactgaggcatccgtgcttaccatgctgccggagggcgaggatgtggtcgtctatgatgcgctggatgagtacgggtggtaccgtgtgtcgacggaggaaggcttaggatatgtttcgggagattatgtgacggtccggacggagtttcgcgtggcagagtcgaaggaggaagagaaagagagattagagcgagaggaggcggagcgccaggcggcagcagccgcggcggaagcggcaagaaaagcacgcgaagaggaagagagaaaggcagcggaagcagcgagaaagacacaggaagaagcagcaaaagcaatggcacggcagcagacacaaaatgcgcaacaggcgcaacaaaaaaatgacaaagtacagggaagcagtcaggggcaaagcagcagttcattcggcagtaatacaacagcgaaaccgcaaacagtttccaatggacaggcagtcgtgaactatgcagctcagtttgtgggaaatccctatgtttatggtggcagcagcctgacaaacggagcggactgttccggatttgtgatgagcgtatatcaggcgtttggaatcagtctgccccattcttcaagtgcactgcgcagtgttggatatggtgtcagcttagacgcgatacagcctggagatatcgtatgttacagcggacatgtgggaatttatgcaggaaataatacgctgcttcatgcaagttctccaagtaccggcatcaagtacacgtcgcctgtcacctaccgcgaaattctggcgataagaaggattttctaatgatctatggaaaatatggatgcgcaaccgattgaaaaaaattgtgaagaatttaaaaataaaggtaaaaaaaagggtaaatcatgtatttttgcacaagtataaatatgcattttttacaaaagagaaaaatacatgttaaaaatttgtcataccgtgtcgaaataaaatccaatattgtcattttgctgataaatcaaggaatatcagggatttttcataaattgacaaatgaaaaaaaatgtgcaataatcagaaaactgataagaaaaaataatgttttttgttttcgatgtaggaaggaatgagtcgaatgattgaaagaaaaatcaaattatctgacacagaggaagtaaaggattttgtgaatgctgccggaaaatgtgattttgaaattgatgtatgttacagcagagcagtcattgatgcaaaatctttgcttggaatgctttatttaggtgtttgcaaggaacttacgatcaagtatggcgaaaaggatgcacgttttgaacaggttgttggaaaatatgcaatagcctgaagcagagatgctgcccatagatcatgatttatgggacgatgtataacagaagataaagggatagatgaaaagactgatttatatatctggaaaggtatgtggaatcagtcttttttgtgctataatccatatatgagcaaaaagattgaaaagaacgaaaaaggtgtcataaaaatatcggtccgtgatctgatcgaatttatcctgcgggagggcgatatcgacaaccgccatggacgcggtgcttctgcggaggcgatgcttgccgggggaaggatccacagaaagatccagaagcggatgggcagcaattaccatgcggaggttccactgaaaattgcaatcgaggaagacgagtaccagcttgtgatcgagggacgtgcggacgggattctgatcgagagcgcggaggaagagatcacatttgcggataattttaatcacatgacgatgccagaagactgcaaagtcacgatcgacgagattaagggcatgtacatgaaacttgatctgttagacgatgcggtcggtgtacaccgtgcacaggcgatgtgttatgcctatatctatgccctgcagcatgatcttgccactatttcagtgcagatgacgtactgtaatttagataccgaggatatccggtattttcattatgattacacgtttgaggaacttgcggtctggtttgagaagctgatcaccgagtacaaaaaatgggctgattttcagttcgcatggaaaaaactgcgtcaggcatccatcaaaccgctgcagtttccattttcctaccgggaagggcagaaggaattagcagccggtgtgtaccgcacgatcagcagaaagaagaatctttttatccaggcgccgaccggagcaggaaagacaatatcgaccgtgtttccggcggtcaaggcggttggggaggatttagcggacaagatcttttatctgacggcaaagacgatcacagggacggtggcgcgggaagcatttgaacttctgcgtaaaaacggatatcaggcaaaagtgcttacaatcacggcaaaagaaaagctgtgcctgtgtgaggagatggagtgcaatcctgtcaactgtccatacgcaaaagggcattacgacagggtcaacgctgcagttttttcgttgctgcaaaaggaagatatgatcacgagagaggtgatcttagaacaggcgaaggaatacaatgtctgtccgtttgaaatgtgtctggatacggcgacatgggtggatgatatcatctgtgattacaattatgtatttgacccgaatgtctatctgaaacgtttttttgcggatggtaccacaggagattacatttttctggtggatgaggcgcacaatctggtcgagcggagccgggagatgtacagtgccattatatataaggaagattttcttttggcaaagaagattttaaagaaatatggtcaggcaaaactgatgcgggaactggaaaaatgtaaccgcgtactgctctcctataagcgtgagtgtgagaaatatgtgatctatgaatcaattggaaattttgcgtttgagttaatgaacgtggcgtcggatctcgatgaatttttacagaaagcaccggagttcccggagcggaaagatttaagtgagttttatctgaatctgcgcaattttttgaatatttatgaactgctggatgaccactatgtcgtttatgcggaacacgagcaggatggacgctttaaactcaaattatactgtgtggatccgtcgaaaaacctgcaggagcgtatcaacaaagggaatgcaactattttcttttccgcgacgctgcttccggtgggctattataagagcctgctctcgactgaaacggataattatgcagtttacgcaaagacggcattccgggaagaacagaaattgctgctgctcggaaatgatgtgagcagcaagtataccagacgaagtgcaggggagtttgagcggatcgcttcctatgtaaaaaagacgacggatgcaaaaaaaggaaattatatggtgttttttccatcctacaaaatgatggagcaggtctgcgatgtctttctggaaaaatgccagtcagatccatcctgtgaaacggaaacgttgattcagcagcctgggatgaaagaagaagaaagagagtcttttttacaggcattttcggaagaattatcgggagagcggaaaggatcgctggctgcattttgtgtgatgggcggtattttcggggaagggatcgacctgaaaaatgaacagctgatcggtgcgattgtcgtcggcacgggactgccgcagatcagcaatgagcgggagatcctgatgggatattttgaaaaacggcttggtgccggatttgattatgcctaccggtatccgggaatgaacaaggtgttacaggcggcaggaagagtgatacggacggtggaggatgtcggagtcatagaacttttagatgagcgtttcctgcagagtgaataccgtgcgctgttcccaagagaatgggaaaggcagacggtatgcaggatagatacggtggaaaagtatttagaagaattctggaaccgttcttaagtctgtgtcagatcgtaggcagcagttttaagaattcctcggtggactgtgaaaccgggagcgtcgggttgatggctgcgaccatctgtctcgatggcagtttttcctttgtttttacgataaacagatctttggattcccggcttaaacagtaatccggtataaatgcgataccaagaccgatgcgcgcaaggtcgatcagaaggtcgttactgctaagttcgatctgcgggatcagctcaagctgatgctgtaaaaacaggttgtgcaggaactggctcgtcgtacttttgcggtcgagcatgaggattgggtactgtttcagttcctcaaacgggatctcctgctgtttcaggttaaaatatgccgggtttgcaatgaatacgtcggtaaaattgcagacggtcttctgaatgtaggagtgattcaggttcgagttcggaaagttggtcacgatcagatcgacttttccctgatcgaggagatccacgcagctaagggatgtcgcgttcgtcaccttgatcggcacgttcgggaactttttgtggaactgttttaaataaggtactaaaaagtaacggcagatggtgtcgcttgcaccgatgtgaagctgaccgagtccgagactgccggagtctaaaagctggctttcaccgcgctgaatcaggttcattgccggttcgatgtgttttaataatacttttccggcaggagtgagctgtacttttttcgtgctgcggatgaaaagcggctggtctaactttttctcaagcgttttgatcgactggctgaccgcggactgggaaataaaaagctgcttgcttgcctcggaaaaacttaaggatgttgccacataataaaacactttatataattcgtaattgatatccatgaagtcctctttctgcgggctggccgcatatcatttgaatgaagaatgttaataaaaataactatcatgattataagacgtgcttataaatctgtcaataaagactgataatggggatgcgtgaaagcattttccaatgaaagaaaatgattcaggagtaaaaataagaacatgtctgcaacaaagcagatataattcatgacaataaaatgctcgcagagtgtgcattctattatttatagaaatattaataaaattaataaataagat

SEQ ID NO: 5188 - DNA, 30584 bp, Unknown
  gut microbiota DNA sequence
aaaagacaaatggaaactgagaatggaggttaccgcatgagcagtgtaaaacgtgtatatgttgagaagaaaccggaatatgcagtccgggcaaaagaattgcagtctgaaatcagaagttatcttggaatcagtggtgtgacgaaggtgcgcgagctgatccgttatgatattgaaaatatttccggggaaacttataaaaaagccttagtaaccgttttttccgaaccgccggtagacgatatttatgaggaagagtttgatttaaacggagcaagaacattttccgtagagttcttaccgggacagtttgaccagagagcagattctgcagaacagtgcgtgaaattattaaatgaagaggaagagccgatcatccgcactgcagtgacttatgcgatcgagggaacgatcagtgacgaagaatttgcagcgatcaaaaaacactgcatcaacccggtcgattccagagagacaggcttagagaaacctgagactttagtgcagagtttcccggagccagaggatgttaagatctttgacggttttcgtgatacgccggaggctaagttaaaagagttatacgattcattgaatcttgcgatgacattcaaagactttttacatatccaaaattattttaagaacgatgaaaaacgcgatccgtccatgacggagatccgtgtgttagatacctactggtctgatcactgccgtcataccacattttccacagaacttaaaaatgtggcatttgatgacggttattactgcgcgccgatgaaagagacttatgaggattacttaaatacccacaagaacctgtatgcaggacgcagtgataagtttgtatgtctgatggatcttgccctgatggcaatgaaacgtctgaaaaaagaaggaaagttacaggatcaggaagagtccgatgagatcaatgcatgttccatcgttgttccggtagaagtagacggaaagacagaggagtggctggttaatttcaaaaatgaaacacacaaccatccgaccgagatcgagccgtttggtggtgccgctacctgtcttggcggtgcgatccgtgacccgttgtcaggacgtacctatgtttaccaggcaatgcgtgtgaccggtgccgcagatccgacggttcctgtttccgagacgatctccggaaaacttccacagaaaaaactggtgagagaagctgcacacggatacagctcttacggtaaccagatcggtcttgcaaccggatacgtcaaagaagtttaccatccaaactatgtggcaaaacgtatggagatcggtgcggtcatgggtgctgctccaagacgtgccgtacagagactgacctctgatccgggtgacatcatcattttacttggaggaagaaccggacgtgacggtatcggtggtgccacaggttcttcaaaagcgcacaacacagagtccacagcagtctgcggtgccgaggtacagaaaggtaacccgccgacagaacgcaagatccagcgcctgttccgccgtgaggaagttgcccatatcatcaaaaaatgcaacgatttcggtgcgggcggtgtgtctgtagcaatcggtgagcttgcagacggacttcgcgtacagcttgacaaagtgccgaagaaatatgccggattagacggaacagaacttgcaatctcagaatcccaggagcgtatggcagttgtggtatctccttcggatgtcaagaccttcttaggctacgcagcggaggaaaacttagaggcagtggaagttgccgttgtaacggaggagccgagacttgttttagagtggagaggcaaagagatcgtaaatatctcccgtgcattcttagacaccaatggtgcgcatcaggagacgaacgttgcagtggatatgccggtaccggaggataattacttaaataagatctctacaccaaaagttgcagatgcggttgcgaaaaacgatatgaaggcagcatggcttgcagagctggctgatttgaatgtctgctcccagaaaggtcttgtggagatgtttgacggttccatcggtgcaggaagtgtttacatgccattcggtggaaaataccagctcacagagacacagtccatggttgcaaaacttccggttgcacatggaaaatgtgatacagtaaccatgatggcatatggttttgatccgtatttagcaagctggagcccgtaccacggtgcgatctatgcggtattagagtccttatcaagaatcgtgaccgcaggtggtgattataaaaagatccgttttacattccaggaatacttccgcagaatgaacgaggatccgaagcgctggagccagccatttgcagcacttctcggagcttacaatgcacagatcggttttggacttccatctatcggtggaaaagattccatgtcaggaacgtttaatgatattgatgtaccgccgacactggtttcctttgcagtggatgtggcaaaagagcaggatatcatcacaccggagttaaaggcagcaggaaatgaactgttatactttacgatcgacaaagacgaatatgacgtgccggtttacgcacaggtcatgaaactttatgatgcggttcatgtattgatccagaaaggtgcgatcgtttccgcatatgcgcttgacggaaaaggtcttgcagcagcacttgcaaagatggcattcggtaacaaacttggcgtgacagtagataccgatgtgacaactgatacactgtttgctccgggctttggtaatgtcgtggcagaagttccggcaggcaagactgcagaagtttacgaggcactgcagaatgcaggtttatctgcaaacgtaaagagagcaggtgctgtcgatgagaaagcagcatttatctgtggcgatatgaaacttgcgatcgatgaggcattgaacgcatggacaggcacattggagaaagtattcccgactcgtgcaaccgaagataaagaggaagtaaagacagatctttatcatgcagattctgtttatgtatgcaaacataaagtggcaagaccgaccgtatttattccggtattcccgggaaccaactgcgagtacgacagtgcaaaagcgtttgagcgcgcaggtgcggatacgatcgtaaaagtatttaaaaacttaaatgctgaggacatccgtgagtccgtagatgaatttaccaaggcaatcgaccaggcacagatcatcatgttcccgggtggattctccgccggtgatgagccggaaggatctgcaaaattctttgcaaccgcattccgcaacgcaaagatgacagaggcagttatgaaactgttaaatgagagagacggtttagcccttggtatctgtaacggattccaggcactgatcaaattaggactggtaccttacggcgagatccgcccgcaggcagcagattccccgacactgacctacaacacgatcggacgccatatcagcaagatggtatacacaaaagttgtcaccgacaagtccccgtggttagcacaggcggaacttggaaaagtttactgcaacccggcatcccacggagagggacgctttgttgcaccgaaagaatggcttgataaactgtttgcaaacggtcaggttgcaacacagtacgtcaatgaggcaggtgttccgaccatggacgaagagtggaacgtcaatggttcctactgttccatcgagggtatcacaagcccggatggacgtgtgctcggcaagatggctcattccgagagacgtgacagaagcgtggcaattaacatttacggagagcaggatcttaaaatctttgagtccggtgtggcttattttaaataagagacaatattaaaagggaagagatatttattctccttggacaattttaaaagaccttccagaaaggaaaagaaaaatcctttctgggaggtctttttatccatgttattttatccggactctcgccattgcgttcccaggtaggacggtagtctttatcaccggttgtatatcccttggtcagtgtgcagaaagaaccgttgtctgccggacagccttcgcataaatcttcctgacaaaatacttgtggtcgttcgtaggttttcataaaaatacaccctccattcttgaatctatatgtccgcttctatcatactagtataaagaatatgggtacatggataaatgtgtcattttttattcaggtgtgtttttatatgattttctgcgtttttatagacaaaaatgaatttgccaccggtaatgtgctataattaaataatctagaaagtgaacggaggaaaacagagtgcgaaaaaatcaggaaaaacggcagtccaaaacactgttagatattctgagagaagaaaaaacagataagtatcaaggcggtatctatcataaaacacagatcgatttaacctataattcaaatcatatggaaggaagccgtctgacgcacgatcagacaagatatatttttgaaaccaataccatcggtgttgaaaatgaagttcttaacgtggatgacgtgattgaaactgcaaaccattttcggtgcattgatatgataattgatgatgcctgtatggtattgacagagaaattgttaaagctgctccatctgactttaaaaaatggaaccagtgattccagaaaagactggtttgctgttggagattataaaaagatgccaaatgaggtcgggggtatggagactacattaccggagcaggtatccggtaagataaaaaaattgctggcagaatataatgcgaaagaagaaaagtctttggaagatattttggattttcatgtgaagtttgaaagaattcatccgtttcaggatggcaacggacgtgtcggcagactgatcatgtttaaagagtgtctgaaatataatattgttccatttattatcgaagatgatttaaaaatgttctactatcgggggctgaaagaatgggacaatgaaaaaggatatctgacagatacctgtcttacggcacaggacagatataaagcgtatcttgattatttccgaattgattattgatcattttaagaaaacttacagaaaatgaaaatcctttcaaactgatcaaaagatagatacaatatgatcaggcagcagagaacgtcaaaaacgtgtaaagataattacacgataaacaggaaagtataggtaaaatatgagcagaatcatcagtattggaaagcaggattttgtatctttaagaaagaaccattatttttatattgataaaacagattttataaggcagtggtgggaaagtgaaaaataccgcatactgcagggaacacatcgggttatttttgtcagctttgcggatgtaaaacagaacaattacaaagatgctgttcaaaagataaaaaatattattgtggatgtttatagacaaaaccgctatctaaatgaacaggaatgttttacagagaatgagcatcggcagatatgaagatacagatggaaagtcttttaaacggaaagacgattgaagttaattttgatgaacagatcgtgttcagccatcttgcacaggatgaaagcgcggtatggagtcttctggtagcaggtggttatttaaaggttgaggatgtggatgcaatgaattattgtatgaataagattacgcttgcaacgtttagttattttgatgtcggaagtgaaggcgctggaaatcaggaaccggaaagattttatcatggatttgtgcttggactgatagcagaccagacagatatctatgaaatcaggtcaaaccgggaaagcggctttggcagatatgatgtcatgatggttccgaaagagcgggaaaaaacaaaaataccagcaattatattggagtttaaggtaaaaaataataaaaaagagcagacacttgaagaaaacagtacagtcatcactagtgcagatcaaagaaaaaaatatgatgccgaactgttggcacggggaataccaaaagagaagatcagacattatggatttgcatttgaaggaaaaaatgtgttgatcggatcgtgagaagatattaaagaaaatggaatattctctttccacccggtataaaacatgatacgatgagaaaaataaaaccaaacaaaacaaaaatggaggcgaacatgaaaaaatttataatactattgctttcaatttttcttgcaatgtcacttgctgcctgtggaaataaaacagacagcagggattcatcaggaaagacagagatcaaagatgccaaagagcttcttaccacagtctggaacagctacgaagaagacgagaaattcgccatcgcaggcggagatatgacggaagaaaatatgacagaggatgcgccggggacatttgggatcacggatgcggatgaattagaccgcatgcttggctttccggcggcggatgcggaaaagatcgataatgcggcttccatcatgcacatgatgaatgcgaacacatttacctgcggtgcctatcatctgaaaaatgcagatgatgtaaagagcgtagcggcagacctcaaggaaaatgtgatgggcagacagtggatgtgtggatttccggacaagctggttgtaatttcgttggatgattatctggtatctgtttttggaaatgaagaactggtaaacacgtttaaagacaaactcacgcagacttatgaaaacgcgaaagtcatcagtgaggacgggatcgtataaatgttattttcaagtatcacgtttttgatttattttcttccgtgtatggtgctggtttattttctggctccggggcggatgaaaaatacagtgcttcttttggggagtctgatcttttatggatggggagaaccgaaatacctgccggtgatggcagcagtcatcttagctggttatctgtctgcccgtctgatcggtacatgtcagaataaacggcagtcaaaaattcttttggctgccgctgttttattggaaatttttccgctcatctattgcaaatatgccgattttttcatacagaatctcaatgtgctgacagggcagaaaattccactgcttagcattgcaatgccgcttggcatcagtttttatacatttcaggtcatcagctatacggtagatgtataccggggcagtgtgcaggcacagaaaaatctgctcacgtttgctgcttatgttgcaatgtttccgcagctcgttgcagggccgatcgtgcgctattcggatatcagaagtcagcttgaaaaccgtatgcacagcgtggaaaagtgtgcatatggaattcgaagatttgtgaccgggctgtcaaaaaagatactgattgcaaatgtactcggggagctgatcggacagtttcaggcttccgaggaaaaatcggttttatttttctggatgtatgcggtagcgtttatgcttcagatttactttgatttttccgggtacagcgatatggcggtcggactgggagctgtttttggatttgattttccggaaaacttccgttatccttattgttctgcgagcattaccgaattctggcgcagatggcatatttcacttggcgcatggttccgggattatctttacatcccgctgggcggcagtcatgtaaaacctgtgcggtggatcttcaatatttttcttgtgtggatggcaaccggattctggcatggggcggcatggaattttatcctgtggggactgatgtatgcggtgcttttactgattgaaaaagcatggctgttgccttatttaaaaaaacataagatcgtcggacacctgtatgtgctgttttttgtgctgatcgggtttgtactttttgatgcatcctccgtggcggatttttgggattgcatcgtatctatgtttggcgggggacagataaaaccggttacgacagagaacctgtattatctgaaaagttatgcagtgatcatcctgactgcggtgatcggggcgacgccgcttcctgcgagattatatggaagattgcagaaaaagaaaggcttaaagcagacgcttgacattgcagaaattctcctgctggtaatgttactgcttctttgtgtggcatttctggtagatggttcattcaatccgtttttatatttcagattttgagggcgattatgggaacaaagcgaaaagacaggatcactgttggagtgacggcactgatcctgtttggattcttaacaggaaatattgcgaaaagtgatgatacggtttctgtctcagagcgcagaaaacttgcacagtttccgaaaataaatgtggaaaacatgaaagatggtacttttatgagtggatttgagtcgtatgcaaaagaccagtttccgttacgggagcagtttcgtgcattaaagacagcgttttccatgtatgtgctggggcagagagaccagcatggactttatatcaaagatggctatattgccaaaatggaatatccgcttcatgcggattcactgcagtatgcagccacgcgttttggggaagtctatgatcgttacctttcggatacagacacggatatctatctggcgatcgtgccggataaaagttattttctggcagatgaaaatggttatccgtccatggattatgatatgctgacggcgcagatgagagatgggacgaaatatgcacagtatattgacatatttggggatcttgaactttcggactattaccgcacagatgcacactggcggcaggaacagatcacggatgtggcacggcacctcgctggggcaatgggggtaaatccggcgacagaatacgaaacaaaagaactggaaaatccattttacggtgtctattatggacagctcgcacttcatggacagcctgatacactgtattatctggataatgacgtgcttgaaaactgtatcgtgtatgattatgaaaaccgagcggaaaataagatttacgacatggaaaaaacaacggggaatgatatgtatgagatttttctgggaggatcgaaatccctgatatcgattgaaaatccgaatgcgaaaacagaccgggaactggtcatgttccgggattcctttggaagcagcatcgcaccactcctggcagaagattatgcgaagatcacactggtggatatccggtatctgcccgtggagcggattggaaactatattgattttaaagatcaggatgtgctgtttttatatagtacgtcggtgttaaatcacagtgagacgttaaaatgacaggaggctggggcacaaatagtgcattcacaatatatcggctggtgcaatttgccaattaataaacttgagtgcactatttgccccggcatcctaacagcagttccggtcagggaatcgggataaattccggtttcctgttcttaaataccgtataatgcgtaaagccggcttcttttaatatagaaggaactttttcaaaatcaaatgcgacatgctccggctgatgtgcgtccgcaccgatcgtgatgatctctccgccgagttcatgatagcgcttaatgatgtcctcggccgggttcggatggccgagtccgtatttgaaaccgccggtgttgatctcgattccttttcctttgataatgagagcctttaagatctcatcgatgatgtcggcatatttctgataggaataattggcatttttatttggaccgtatctcaccacatagtcgatgtgtccgtatacgtcaaaaccatcaaatgcggcgatgttctctaagatcgactcaaaatattcccggtagccttcctcctccgagtggttttcccaataagccggataatatggatccacaccgtgcatgacgtgagaggatccgatcacgaaatcaaacggatactgggacaggatgtcggcgtggatgccggcaaggtgcggctgtaacccaagttcaatgccgagtcgtaccggaagaatttccttatatttctcctgcattgcctccacggaagagacataattcggcagatccagcaaaaatgtctccggctcatccggatagtcgatgtcaagatggtctgtaaaacagattccttttaaatttttttgttttgcagcagcgatcatatcttcctgcggtgtgtgactgtcgccggaaaactggctgtgcatatgcgtatcccataacatattaaatcctctttcctgtgccgggctggcacataatgtgaaatcttatttgcgcaattacgcatatcacaaatgctggtttgtgggtgatatgagtttccctgtgtagggtggttctggggagttacgattggcaaattgcatcaagccgggactgttttgttccgttgtccgaaaataagaaagtctaagtatgcctgattcaggttgaggcggagtgacgtgtgcgtcctaaatgtgccgtccgggcacattaggacttgtgctgccgtccatggcagcacaacactgtattgtgaacaggcatacaaagactttctaattttctcccaaagtcacaaaacgagtcctggcttgatgcgatttgccagccgcaaggttgtgaaccacccttagccgggaaactcattttacaaccttgggggtgcgtaaatttttgtgacattcatttcaaaaaggttgaaaaatctcgacgcaatctgttatatctatgcttttaaacatacatacttggaataataatctgcattattagtctgttaatttacgaaatgattaatgtaatgcaacatagcagatgaaacttcagacaagtcatcaggctgaatatcagtgatattgcacattaggattttaagcatatttccattcgtgcgaatatcaaaaattcacacccgcgcccccattttgagatgaaccgcccacccaaatggtgtttcataacctggaggctggcatcttgcgcaaagcctgagctgattttgtgactttgggagaaaattagaaaatcttagtgtgtctgtagatacacagtgatgttctgccacggatggcagaacaaggcttcacgagccacggatggctcgttgaacgccggtcacgtcactccgagaaaatctaactcagacacacttagacttttcttattttcgtacaatggaaccaaaattaactccggctttgcgcaagatgccactcacagacctgcgacacaccattgggacgggcgatttatttcataaacaaaccaacatttggtaagtagcttatgatatagtatagcctatcccacaaaagaaaagaagtcatatttgtatattttgtataaaattcatgaaaaaacgaccggaaaattgcatatagtgaaaaatttaacaaacacagaataaagtcgagaaaaaggcttgaactttcaaaagaaattggttaaaataaaggaagcttgggacgggcataagtcccatcaagttatcacatttacaaattctaggaggaattaaaaatggcagtaagagtagcaatcaatggttttggccgtattggtcgtcttgctttcagacagatgtttggagcagaaggatatgaagtagtagcaatcaacgatttaacaagtcctaaaatgttagcacacttgttaaaatatgattcatctcagggtaaatatgagcatgctgatgaagtttccagcacagatgattctatcatcgtttgcggtaaagagatcaaaatctacgctttcccagatgcaaacaactgcccatggggagatttaaaagttgacgttgtattagagtgctccggtttctatacaagcaaagaaaaagcacaggctcatatcaatgcaggtgctagaaaagttgttatctctgctccagcaggaaatgaccttcctactatcgtttacaatacaaaccacgagacattaaaagcttctgatacaatcatttcagcagcttcctgtacaacaaactgcttagcaccaatggcagatgcattaaacaaatatgctccgatccagtctggtatcatggtaacaatccatgcttacacaggtgatcagatgactcttgatggacctcagagaaaaggtgatttaagaagatcccgtgcagcagcagttaacatcgttcctaacagcacaggtgctgcaaaagcaatcggtcttgttatcccagagttaaacggtaaattaatcggatctgctcagcgtgtaccgaccccaacaggttctacaacaatcttaacagcagttgttaagaaagctggcgtaacaaaagaagacatcaatgcagctatgaaagcagcagctaacgagtctttcggttacaacgaggatgagatcgtttcttccgatatcgtaggaatgagatatggttcattattcgatgcaactcagacaatggttaaccaggtatctgatgaccagtacgaagttcaggttgtttcatggtatgacaacgagaactcttacacatctcagatggttcgtacaatcaaatacttcagtgagttagcataatcgacgggttacgataactatatgcgacttttagcaggtccggtcctattggaccgggcctgtttttatacctcaattatataaaaggaggacatattttatgtcattaaacaaaaaatcagtagacgacattaatgtaaagggaagaagagtacttgtaagatgtgatttcaacgttccgttaaaagaaggaaaaatcacagatgagactcgtatcaacgcagctcttcctaccatccagaaattaatcaacgatggtggaaaagtaattctctgttcccatcttggaaaagtaaaaaacggcccaaatgaaggtgagtctttagctcctgtagctgtaaaactttctgaaaaacttggcaaagaggtaaaattcatctctgattatcatgtaacaggtgaggaagctaccaaagctgttgctgaaatgaacgagggagatgtaatcttattacagaatacacgtttccgtggcgctgaggagacaaagaacggcgaagagttcagcaaagaattagctgatcttgcagacgattatgtatgtgatgcattcggttcttcccacagagcacatgcttctgttgcaggcgttacaaaattcatcactgcaaaaggtggttctaacgtagttggttacttaatgcagaaagagatcgatttccttggaaacgcagtagaaaatccggtaagacctttcgtagcgatccttggtggtgcaaaagttgcagataaattaaacgttatctccaacttactggaaaaatgcgatacattaatcattggtggtggtatggcatatactttcttaaaagcacagggatatgagatcggtaaatctttagtagatgatacaaagatcgattactgtaaagagatgatggcaaaagcagaaaaacttggaaagaaattactccttccggtagatgctgtaaccatcgcagatttcccgaacccgatcgatgctccggtagaagttactgtatgtgacgtaaaagatatgccggctgacagagagggatgcgatatcggaccaaagactcaggagttatatgctgatgcagttaagacagcaaagactgttgtatggaacggaccgatgggtgtatttgagaacccgacattagcagctggtacgatcgcagttgcaaaagcacttgctgatacagatgctacaacaatcatcggtggtggtgattccgcagcagccgttaaccagttaggattcggcgacaagatgagccatatctctaccggtggtggagcttcccttgagttcttagagggtaaggaattaccaggcgttatggcagcagatgataaataagagagagccatagagtgaattcggctgccataacgccttggcatggcagccgatgataaataagatcaacaaactttaaaatgggaaaaagaggataagatcatggcaagaaagaaaatcgtagccggcaactggaaaatgaacatgactccaagccaggctgttaaattagtagaggaattaaaaccattagtagtaagtgatgatgtagaagttgtttactgtgtaccggcaatcgacatcgtacctgttgttgaggctgtaaaaggaaccaacgtagcagtaggcgctgagaacatgtactatgaggagaaaggtgcttacaccggagagatcgctccagagatgttagttgacgctggcgtaaaatacgttatcatcggtcattccgagagacgtgattacttcaaagagtgcgactgcatgttaaacaaaaaagtgaaaaaagctttcgagcataacttgacaccaatcctttgctgtggtgagacattagagcagagagagatgggaatcactttagactggatccgtatgcagatcaaatctgacttaaaagacgttactgcagagcaggttgcttctatggtaatcgcttatgagccgatctgggctatcggaacaggaaaaactgcaaccacagagcaggcagaggaagtctgcaaggcaatccgtgactgcatcaaagaagtatacggtgctgacactgcagagaaagttcgtattcagtacggcggatctgtaaatgcaggtaatgcagcagagttgtttgcacagcctgatatcgatggtggtttagttggcggagcttccttaaaagctgatttcggtaagatcgtaaactataaataaatcataatcaggttaaggggattctctctgggagtgaaagcagaaggaatccccttttcccttgatatatgcggaaaatgtgaaatatatgaaaaagaaaatagcacggatcctgatatgtgtcctgattataatctgcggttggaacgtgatggtaagagaatggaaccaggcaggaaaaacggattcggaatataaagaaaataatgcgaatgcaagggcacagagctctaacagtcaggacgtttcactggaagacgatttacaggaaacggagacatccatacaacatagtggatcaaataacagatcagaaaatgagaatataacaggtaattccgggaactcatcgggaaaaaatgaaagagacgatgaaaaagcggatgccgatgacagcataaaaacagatgtaacgaaaaatgaaacggatattgcggacaatcaggtcaacggggatatggaaataaaaaatgaaccggcagaagaagagccgaccgaagatccctatgaatatgaaaccgggtatatttttctgggagattccagattttatctgatgaatgaggaatgcaaaatcgaagatgtgccgaatttttttgtggtatcctgtcctggaatgggatatgcgtggctggcagatactgcgttcccgaaggtacagttgctgcagcggcagcatacggaaatcaaaaactggattgtgatttgtggactgggagtcaatgacctgacatcgatccgttcctatctgaacaaatatcgcagatggccggaaagttcaaaactttatctgttgtctgtgaatccgacaaagtcaggtgctccggtaagatgtaataatcagaggattgaagcatttaataaccggattaaaaaggtagaaaacgctgcatatatcgattgttaccgatatctgacgaatcttgggtttggaacaaaaggagacggactccattatgatgcgcccacgaactgggcgatttattcctatatattagaaaagcttaataaggatgccggaggggatccggtcacggaaacagaatgccaggcaaaggcaaagaagtttgaaaaacagctgagccagaaaaactattgaaaacagatgaggttatcagtataatggttctggattaggagaatcgtatacttttgataaatggaaagagaatagaaagtgaggaaacaaaacatgagtaagaaacctaccgtattaatgatcttagacggatttggactgaatgaaaaaacagagggcaatgccgtatcacaggcaaagacaccggtgatcgacggacttatgaaagactatccgtttgtaaaaggaaatgcaagtggtcttgcagttggtcttcctgacggacagatgggtaactctgaggtaggacatttaaatatgggtgccggaagaatcgtatatcaggaactgacgagaatcacaaaagaaatcagcgatggcgatttcttcaaaaatcaggcattattagatggtatggaaaacgtaaagaaaaacggttctgaccttcatttatacggactgttatcaaacggtggtgtacacagccacatcacacacctgtttggtctgcttgaaatggcaaaaaaagagggcgttgagaatgtatatgtacactgcttcttagacggacgtgatactgctccgacttccggtaaagagttcatcgaagaactggaagctaagatgaaagaaattggtgttggcaagatcgcatctatttccggacgttactacgcaatggatcgtgataacagatgggatcgtgtggagaaagcatacaaagtgctgaccactggcgagggagaaactgctgagagcgcagtagcagctatggaagcatcttatgcaaaagatgtgacagatgagttcttcgttccaactgcaattacagagaacggcaaaccgatcgcaacaatcaaagacaacgatactgttattttctttaacttccgtcctgaccgtgcgcgtgagatcacaagaacattttgtatggatgattttgatggatttgaccgtggcgcaagaaagaacgtaaaatacatctgcttcacagagtatgacgtgacgattccgaacaaagaagttgcatttaagaaagtagaactgaaaaatacatttggtgagtatttagcagcacatgatatgacacaggcaagaatcgccgagacagagaaatatgcacacgttaccttcttcttcaacggcggtgtggaagagccaaacaaaggtgaggaccgtattcttgtaaaatctccgaaagtagctacctacgatttacagccggagatgagcgcaccggaagtatgcgacaagttatgtgcagcaatccgttctgagaaatatgatgtcatcatcatcaactttgcaaacccggatatggttggtcacaccggaatcttagatgcagcgatcaaagcagttgagacagtagatacctgtgttggaaaagcagttgaggcattaaaagaagtagacggacagatgttcatctgcgcagatcacggaaacgctgagcagcttgtaaactacgagaccggcgagccgttaacatcccacacaaccaacccggttccatttattctcgtaaatgcagatccttcctacaccttaaaagaggacggatgccttgctgatatcatcccgactatgattgagctgatgggaatggagcagccggcagagatgacaggaaaatctttactgatcaaaaaataaaagagcgatataatatagccggataaaaagatgccacagactggtatatttatttttggacaggcagggcagctgctgtcagaaagaaatttatcagttttgtggcagtttttttgaaaggaaaaggagcattttcaggtaaaattcatgcaggaaagaagctgagaaagtgagaataagagaatataaacaaaaatataagtgcaacttataatatgattaaaactatacaaaaatactaataaaaagaactgatttttctatatcacatatcgatgtccatacgggcaaaatcattgactttccaaaagactatgtattataatttttgagtaacatcagaaaatgatatggtgcttataacaccggaaaagaggacaaagaggatgagtagcaaagtatttcagccaattaaagagggaaaagtacgtgaagtatatgataacggcgacagcctgatcattgtagcgacagacagaatttctgctttcgatcatattttgaagaacaaagtcacaaaaaagggtgcgattctgactcagatgtctaaattctggtttgatttaacaaaagatatcgttccaaatcatatgatttctgttgatgtaaaagatatgccggaatttttccgggaggagagatttgacggcaacagcatgatgtgcaaaaaattagagatgcttccgatcgagtgcatcgtccgcggatacatcacaggaagcggctgggagagctataaagaaaacggtaccgtatgcggcatcaaactgccggagggattacaggagtccgacaaactgcctgagccgatctttacaccgagtaccaaggcagagatcggtctgcatgatgagaatatctcctttgagcgctgcagagagattttagagaaagagtatccgggaaaaggcgcttcttatgcagaacagatcaaagattatacgatcgcattatataaaaaatgtgcagaatacgcactgaccaaaggtatcatcattgcagataccaagtttgagtttggtttagatgagaatggcaatgttgtattaggggatgagatgctcacaccggacagctccagattctggccgttagagggttacaagccgggacagggacagccttcctttgacaaacagtttgtaagagactggttaaaagcaaatccggacagtgactatctgttaccggatgatgtcatcgaaaagaccgtgaataaatacaaagaggcatatgagcttctgacaggtaagaaatttgtttaatggagatacatttatggacaacaatggatttgtgaaagatacaccatggcagacgaatggggacagcggactgcacgaggaatgtggtgtattcggaatgtacgactttgatggcggagacgttgcgtctacgatctattatggtctttttgcattgcagcaccgtggacaggagagctgtggtattgcggtcagtgagacgaacggacccaagggaaaggtgacctcatacaaaggcatgggacttgtcaatgaggtattcacgcaggataatttagagcctatgcatggcgatatcggtgtcggacatgtccgttattcgacggcaggagcttccacccgtgagaatgcacagccattggttcttaattatgtaaagggaacgttagcgctcgcacacaacggaaacctgatcaatgcaatggaactgcgcaaggatttagagtataccggagcaattttccagacgacgatcgactctgaggtcatcgcctatcacattgcccgtgagcgtttaaattcaaacagtgtggaagaggcagtgggacgtgcctgccagaagatcaagggtgcgtttgcactggtagtgatgagcccgagaaagttagtcggagcgcgtgatccgtacggttttaaaccgctctgtattggaaaacgtgacaatgcctacattttggcatccgagacctgtgcacttgatacgatcggcgcggagtatgtccgtgatgtactgccgggagagatcgttacgatcacaccggagggcggcattcagtctgacctttctttagcactgccaaaagaaaaagaggcgcgctgtatttttgaatatatttactttgcaagaccggacagccatatcgacggtgttagtgtctatgcatccaggatcaaggcaggacgtttcctcgccatggattcaccggtggatgcagaccttgtcgtcggtgttccggagtccggaaatgctgccgcactcggttattccctgcagtcggggattccgtatggcactgcatttgtgaaaaacggctatgtcggaagaactttcatcaagccgaaacagagcagcagagagtccagcgtgcgcgtgaaattaaatgttttaaaagaggcggtcgatggaaaacgtatcattatgatcgatgattccattgtccgcggtacgacatcagaccgcatcgtaaaaatgctgcgtgatgccggtgcaaccgaagtgcatgtaaggatcagttccccaccatttttatggccgtgttactttggaacagatatcccggagagagaacagctcattgcatacaatcgttccatcgaggatatccgtaagatcattggtgcggattcccttggataccttggagttgagcgtttagaggaaatggtcggcggattaagtatctgtaagggatgctttacgggtacctacccgatggaaccgccgaaagaagacatccggggcgattttgagagatagataataacaaatgttaaggagaacagaaatgagtacagacagatatacaagtccgttatctgagcgttatgccagcaaggagatgcagtatattttttcacaggacaaaaagttccgtacctggagaaaattatggattgcattagctgagacagagatggagttaggactttccgagaatggaaagccggttattacacaggaacagatcgacgagttaaaggcacatgctgaggacatcaattatgatgtagcaagagagcgtgaaaaactggttcgtcatgatgttatgagtcatgtatatgcatacggacagcagtgcccgaaagcggcaggaatcatccatcttggagcaacttcctgttatgttggagacaatacagatattattttaatgcgtgaagcattggaattagttcataaaaaactggtcaatgtcattgcagagcttgcaaaatttgcagatacctataaaaatctgccgacactggcatttacccatttccagcctgcacagccgacgactgttggaaagcgtgcaacactgtgggcacaggaatttatcatggatcttgaggacctagagtatgtcatgggatctttaaaactgctcggttccaagggaacgaccggaacacaggcaagtttcttagaactgtttgatggagatcaggagacgattgacaagattgacccgatgatcgctgcaaaaatgggattcaaagagtgctatgcagtttccggacagacttattccagaaaagtggatacacgcgttgcaaatattcttgcaggtattgcggcaagtgcacacaagatgtcaaatgatatccgtttgttacagcacttaaaagaagtggaagagccgtttgagaagaaccagatcggatcttctgccatggcatacaaacgcaatccgatgcgttccgagcgtatcgcatccttatcgcgttatgtcatgatcgatgctttaaacccggcgatcacttccgcaacacagtggtttgagcgcaccttagatgactctgcaaacaagagactttccattccggaaggattccttgcaatcgatggtatcttagacctgtgcttaaatgtagtggatggattggttgtatatgataaagtaatcaccaaacatttaatggcagaactcccgtttatggcaacggaaaacattatgatggacgctgtaaagaatggcggcaaccgtcaggagttacatgaaaagatccgtaccttatccatgcaggcaggaaagactgtcaaagaggaaggaaaagacaacaatctgcttgaactgatcgctgcagatcctgaatttaacctgacattagaggcactgcagtccacgatggatccggcaaaatatgtgggacgtgcaccgatccaggtggataaattcattgcaaatgtggtaaaaccgattctggatgcaaacaaggaagaacttggtgtaaaagcggagattaatgtataataatggatcataacatggcctgtatcagtaatttgctgatacaggttttttgttacaattttgctgttttgtcacttacgaaaacgataggatcctgttacaatcaaagtatcataagtattggaaaaggagaaggttattatggcaaacagaattatgttaaacgaaacatcttaccacggagcaggagcgatcgaagagattgcaacagaggcaaaggcgcgtgctttcaaaaaagcatttgtatgttctgatccggatctgatcaaatttggtgttacaaaaaaggtaacggatattcttgacaaaaacggacttgcttatgaaatttattcagatatcaaagcaaaccctacgatccagaatgtacagcatggtgttgaggcatttaagaaagcgggagctgattacctgatcgcgatcggtggaggatcttctatggatacctcaaaagcgatcggaatcattattgccaatccggaatttgaggatgtcagaagtcttgagggagttgcacccacgaaaaaaccatgcgtaccgatcattgcagtacctacgaccgccggtacggcagcagaggttacgatcaattatgttatcacagatgtggagagaaagagaaaattcgtctgtgtcgatccacatgatatgcctgtcattgcaatcgtggatccggatatgatgtcttccatgccaaagggactgacagcttccaccggtatggatgccctgacacatgcgatcgagggatatacaaccaaagctgcatgggaaatgacagatatgttccatctgaaagcgattgaaattatttcaagatccctgcgtgatgcagttgacaacaagaaagagggacgtgagggaatggcacttggacagtacattgccggaatgggattttctaacgtaggtcttggaattgcacattccatggctcataccttaggtgctgtttatgatacaccacatggtgttgcatgtgccatgatgcttccaatcgttatggagtacaatgcggattgcaccggagagaaataccgtgagatcgcccgtgcaatgggagtcaaaggtgtggacgatatgtctgtggaggaatatcgtaaagcagcagttgatgccgtacagaaactctctgttgatgtgggaatcccgacaaaacttgagacattaaaagaagaagatcttgattttcttgcagaatctgctcatgcagatgcatgtgctccgggtaacccgaaagatgccagtgtggaagatcttaagaatcttttccgcaaactgatgtaattgcagcggtgaaatcatagaatgtatgctttatgattcgtatattgtcataagtaaaagaaaacctttcaggcataattgttttgcctggaaggtttttttgtaacagaaatgtttatgaatgtaacattttcctgcatcaaaccaacccgtatttatgaaatacagtctgcagttcttccggcatggcagatgcaagggcatgtgcgagttcttcggcagagcatttgcgatagccaagcacccactgtacggtcatataaatggaaccctggcagtacatttctaactgaaactgcagctgacgggaaagtctgcacgccatgcgtgtctcaagctgttcggtgtaaaaggcacagatcagttgaaaatcatgatctctcagacaattctgatcgtcatttttaaaagctgctttaaaaaagagcttttcctgctggatataatgaaatttatttaccagtccttcatacacagttttcccttcacccatatgttcgaaagattccagtaaaattttatcaaaataccagttgataaggtcatacttatccttaaaattccggtaaaaggtctggcgtgtcacgccgcaggtctccacaatctccgtgacggtgatcttctctacggaggcggatttcatgcattctttcattgcggtggcaagtttgtatttgatggtttcatttgttttatgttctgatggcatgggaaaatctctttctttttacgttgtgattagttcgtgctggtctgtattttattccgcagtgttccttcttatctggcactgctcatagattaatacattataccatacatggtcaggaataaagcgaatttatagagattttataaagtggtattttaagaaaaaacaacttgttaacacatgcatacaagttgtatgctgaaagtatagaaaaagtggtttacatctgaaaggagaagggataatgagtaacgcaaagcagacgattgaaaccggaaaagcagtacttggtattgaattcggttcaaccaggatcaaggcggttcttgtaaatgagacgggggagccgattgcatccggtgcacatgactgggaaaaccgtttggaggatggcatctggacatacagtctggatgatatctggacgggacttaccgactgttatggcagattagcagaggatgtaaaggaaaaatacgatacggtgatcacatcactcgcagcgatcggattttccggaatgatgcatggctatatggcatttgacaaagacggggagttacttgtaccgttccgcacctggcgcaatacgatcacgggggaggctgcggcagcacttacaaaggagttttcctttaatattccacagcgctggagcatcgcacatttatatcaggcgatcttaaacggggaagaacatgtaggaaacatttcgtattttacaaccttagccggatacattcactggaaactgaccggagagaaagtacttggtgtcggagaggcatccggtatgttcccgatcgacgcaaagacaagagattacaatcagacaatgatcgataaatttgacgcacttgtcgcaccaaaaggatatccgtggaaactgcgtgagatcctgccgaaagttttagctgcaggggaggcagcaggaacgttgtctgctgagggagcaaaactgttggataagagcggtaatctttccgcaggcattccactctgcccgccggagggagatgcaggaaccggtatggctgcgacaaattccgttgcagtccgcacaggaaatgtatctgccggaacatccgtgtttgcgatggtcgttctcgaggaagatttaaagaatgtacatgaggagcttgacatggtaaccacaccgtccggtgataccgttgcgatggttcactgcaataactgtacatcagacctgaatgcatgggttggattattcaaagaatttgcagaagcatttggcatgaaaccggatatgaatgagttgtttggaacactttaccggaaagcattagagggagataaagactgtggaggtctgcttgcctacaattatttctccggtgagccggtaaccggtttaaatgaaggccgtccgcttttcgtgcgcagaccggatgcacattttacactggcaaactttatgagaagccatctttatgcatcacttgccacgttaaagatcggtctggatatcctgttaaaagaggaaaaagtaaaagtagaccgcatttacgggcatggaggactgtttaagacaaaaggagtcggacagggaatccttgctgcggcaatggatgcgccggtagcagttatggaaactgcaggcgagggcggcccatggggcatggcactgcttgcatcatacatggtacacaaagcagaaggcgaaacattagagcagtatttatccggtaagatctttggtggggaaacaggaactgtcatggagccggatccggcggatgtggcaggatttgatgcttatattgaaaactataaaaaggcactggaagcagaaatggcagcggtagagacgatgccgatcttataaaaataataaaaaaataaagtgtatcaggagggaatttgcacatgttaaaaacaaaaaattataaattctggttttgcaccggatcacaggatttatacggggatgagtgcttagagcatgtggcagagcatgcaaagatcatcgttgcaaagttaaatgagtcaggggtacttccttatgaagtcatctggaaaccgacactgatcacaaacgagctgatccgtaaaacgtttaatgaggcaaatatggatgaagagtgtgcaggtgtcatcacatggatgcatacattttcaccggcaaaatcctggatcttaggtttacaggagtacagaaaaccattattacatttacatacacagttcaatgaagagatcccatatgattccatcgatatggatttcatgaatgaaaaccagtctgcgcatggtgacagagagtacggtcatatcgtgacccgtatgagaatcgagcgcaaagtggttgtcggacactggtctgatccggtggtacaggagaagatcgcttcctggatgcgcaccgcagtcggcgtgatcgagagcagccatatccgtgtgatgcgtgtcgctgacaatatgagaaacgttgcggtaactgagggcgataaagtagaagcacagttaaaattcggctgggaagtggatgcatatccggtcaatgagatcgcggagtccgtcgcagcagtatccgaatctgataccaatgcccttgtagatgaatattacgagaaatatgacattttattagagggacgtgatccggaagaattccgccgtcatgttgcagtccaggcacagatcgagcttggttttgaacgtttcttagacgaaaagaattaccaggcgatcgtaacccactttggagatcttggtgcattaaaacagcttccgggacttgcaatccagcgtctgatgggaaaaggttacggatttggagcagagggtgactggaaagttgctgccatggtccgtctgatgaagattatgaccgagggcaaaaaggatgcaaagggaacatccatgttggaggattacacctacaactttgtcaaaggcaaagaaggaatcttagaggcacatatgttggaaatctgtccgtccatcgcagatggcccgatcagcatcaagtgccagccactctccatgggtgacagggaagatcctgcaagactggtattcacctccaaagaaggtaaaggtatcgcaacttccctgatcgatcttggcaaccgtttccgtctgatcatcaatgatgtggactgcaagaaagtggaaaaaccgatgccgaaacttccggtagcgacaaacttctggacaccacagccggatctctataccggtgcagaggcatggatccttgcaggcggcgcacatcataccgcatttacatacgatctgaccgcagagcagatgggcgactgggcaaatgcaatgggcatcgaggctgtttatattgacaaagatacgaagatccgtgatttcaaacgtgacttacagattggggaactgttttatcgttaaacactggaaaagcatgtgcatattttgaagcaaaaacttgttttgtgaaaagtgtgcacatgcacgcaaaaaagttgtgcaaaatcatgaaaacacaaaaacacgcttgaagttttaaataaaagagattatcataagtaaaacaagttgtgtgcacgggcacacaaagaaaaggagaggtatagtatgaaattttttattgacacagcaaatgtagaggatatccgtaaagcaaatgatatgggagtgatctgtggtgttaccacgaacccatccctgatcgcaaaagagggaagagattttaacgaagtaatcaaagagatcacatccatcgtagacggaccgatcagcggtgaggtaaaagcgacaactgttgatgcagagggcatgatcaaagagggacgtgagatcgcagcgattcatccgaacatggttgtaaaaattcctatgacagtagaaggcttaaaggcagtaaaagttctctctgcagagggcatcaagaccaatgtaacactgatctttactgcaaatcaggcactcctcgcagcaagagcaggcgcaacctatgtttctccattccttggaagattagatgatatcagtacagcaggcatcgatctgattcaggatattgttcagatctttgacaactatggacttgagacagagatcatcgcagcatccatccgtaacccgatccatgtcacagactgcgcattagcaggtgcacatatcgcaaccgtgccgtacaacgtaatcgtccagatgacaaaacacccactgaccgacgcaggaatcgaaaaattccagaaggactataaagccgtcttcggagagtagaaatagcttggaaaactataaagacggctttgcggttttcggtgactaaggttttacaaaaagacaatagaaatcgctcggccgtcttcggagagtaataaaaatcattgcgaaacccgtcagcagcttaacgtgagaagagtttgaggtgggtttcgcagagtttatatgacactaaaggagggtatcaatgactatcacagaactgaagcagactgcagtcgaggttcgcaagggcatcgtgactgcaacgcatgctgcgaagtcggggcatccggggggatcgctttcggcgacagaaatttttacatatttatattttgaagagatgaatattgatccaaaaaatccgaaaatggaggatcgtgaccgctttgtcttatcgaaaggacatacggcgccgggactttattctgcgctggcaaaccgcggatattttccggtgaaggatttggagacattgcgtcataccggttcctatttacagggacatccggatatgaagcatattccgggagtggatatgtcatccggttctctgggacagggaatttcctgtgcggtcggaatggcacttgcaggaaagatggatcacaaagattaccgtgtttatacgctgttaggtgatggcgagatcgaggaaggccaggtgtgggaggcatccatgtttgccggacaccgtaagcttgacaatctggtagtgatcgtcgacaataacaacatgcagattgacggaacattagatgaagtctgctcaccggatccgattgataaaaagtttgaggcttttaatttccatgtgatccatgtcgcagatggaaatgattttgcacagcttgcggaggcttttaaagaggcaagggagacaaaaggcatgccgacagcaatcatcgcacataccttaaaaggaaaaggtgtttcttatatggaaggtcaggtaggctggcacggaaaagcaccgaacgatgaggaatatgcgattgcaatggaagaactgggaaaggcgggtgaagcattatgtcagaagtaaaaatgatcgcgaccagagaaagctatggtaatgcattagccgaacttggaaaagaaaaagaaaatctggttgtgctggatgcggatctcgcagcagctaccaagacaggtatctttaaaaaagcgttcccggagcgccatattgactgcggtattgcagaggcaaatatgacggggatcgcagcaggactttccacctgtgggaaagtaccgtttgtcagcacatttgccatgtttgcagcaggacgtgcttacgagcaggtgcgcaactcgatcggttatccgcatctgaatgtcaagatcggggcaacacatgcgggcatctctgtcggtgaggacggagcgacacatcagtgcaacgaggatatcggactgatgcgtgagattcctggcatagtcatcatcaatccaagcgatgatgtggaagcgagagcagccgtgcgggcagcttacgagtatgtaggaccggtttatctgcgctttggacgtctggcagttccggtcatcaatgacaatccggaatataaatttgagatcggcaaaggtgtggaactgcgaaaaggaaaagatatcacgatctttgcgacaggtctttgcgtatcggagacattaaaagcagcagaaacgctggcagcagacggcattgacgcacaggttatcaatatccatacgatcaaaccgttagatgaggaactggtgttaaaagcagcaaaacagaccggccgtgtgtatacggtggaggaacattccattatcggcggacttggcagtgcagtggcagagttgctcggtgaaaaatgtccgacaaagatcacgaggatcggcgtgaaggatgtgttcggagagtcagggccggcaaaagaactgcttcataaatatgagctggatgcagagggcattgcaaaacgtattatggaggaacagaaatcatgttagaggaattaaaaaaacaggtctatgaggcaaatatggaactgccgcggcgcgggctgatcacctacacatggggaaatgtcagcggaattgacagagagagcggatattttgtgatcaagccaagcggtgtggattatgatgcattatccccggatgatatggttgtcatggacttagagggcaataagatcgagggaagatacaaaccgtcatctgacacggcaacgcatattgaactttataaaaaatacgaagagatcggtggaatcgtacatacccattccccggaagctgtcgcatgggcgcaggcaggaagagatatccctctttatggaaccacacatgcagactactttttcggtccgatcccgtgtgcaagaaacctgacgccggaggagatcgaggaagcctacgagaaaaataccggattagtcatcatcgagacatttgagacaagaggcatcaaaccgatgtatacaccggcggtactctgtaagaatcacggaccgtttacctggggaaaagatgccgcagaggcagtccacaatgcagttgtgttagaggaagttgccaaaatggcaaagaatacagaacttttgaacccgaaagtacttccggcaccggactgcatcaaagaaaagcatttttaccgtaaacacggtgcaaatgcatactacggtcaaaattaaaaacagcggcggaaataaagctgcgtggaaatgaggtttaagatgagtggtattgagtttggaaaaacaaaagaaggaaacacagttacaaaatatctgctgaaaaataaaaatggtatggaagttgctgtga

SEQ ID NO: 5189 - DNA, 813 bp, Unknown
  gut microbiota DNA sequence
cttccatccgtaaagtaggtgacacctattattttgtctattcatccatattaatgcacgaattatgttatgccaccagcaagaatcctactagggactttgtctatggcggagttattgtcagcaattgtgatctgcacatcgatacctacaagccggcagatatgccaacagcttacggtgccaataatcacggaagtattgtgcagatcggagaggactggtacattttttatcacaggcataccaataatacctggtacagcagacagggatgtgctgaaaagctgcagattatgccggacggcagtattccacaggtaaaaattacctcctgcggtttaaatggaggtccgcttgagggtaaaggcgaataccccgcttatcttgcatgtaatctgtttaccgataccccatcagtttatgtgggcgaagggaattttccacgagtaatgcaggacggaagggatggagacgaagaagttggatatattgccaatattacagattcaactaccatcggcttcaaatattttgactgccatgatattcgtgaaatcagtatttggacccggggctatgcagatggcacttttgaagtaaagacagcatgggatggagaggtactggcgacattagaggttcaatataccaatgtctgggaaaagtataccgcaccggttacgattccggatggaatacaggcgctttacctgacctatcgcggtaacggaaatgctgcattaagatcatttgagttatcataatctatgttattgcatgtgctgtagtaacttgtaataaaattagcgg

SEQ ID NO: 5190 - DNA, 3317 bp, Unknown
  gut microbiota DNA sequence
ttgatttgttttttgggctgaagctatataggatttcaaatcaatacttttgtcaacatttgtattatgtgttcttcctttcgtattttttacaagcttttcctttcctgatgcgcttatcgttaaagtatctcttgtaccgttgcaaccagcatcttgacttcttgtagtcttttgttgttttccaaacagcgcattaacgaatgactgattggtataaattcggctgttaaaaaaaatattcataatatcacctatatccttaatatgacttatatcatgttccattcttttataatttcatcggcactattcttcacatattttatacgttctgcaccaactacgatttttttgcaccaactacgatttgagcacaaaaaaaggacgaaaccgcccttttcatgaattcagaaacaaatctgctacaaatctgtttccatcctgttttaattgtaaatccccatcatacttatctatgctctgtttcacatttaagagtcctatccctctgccttttcccttatctgataccggcatacgttttttccattttacctttccacaactgttttctatatgaactaccgtcatcttatgataggcactgattttaataaaaatgtatttgtctccgtcagcatttgcggcagcttcaatcgcattgtccagcagattcccgaaaatagttgttatgtctatcggctctatgtaagataagtctacattgtctatcttaatgtccgaatgtatccctttctcctgcatgacagcatttttatctgtcagcaaaatgttcaatatcggattctctgtgtaagatataggaatcagtggtgccagtgtacttctgattgcctctgcatattcgccagccgtatgctccctctctgttccatacaaattctcgatagccctgatatgcttatccacatcatgtaatatccgtactgtctgactatatttttcagtctgtgcaagataatactcatactgcatttttgcctgttgctccaatgcctttacgcggttttcatagtatctcttttcgtctgccattttgacataatacaaaagatacaggtcagccaaaacgatgcagcccatatttaccgctgacagatagcttttctgcccatccctgaaattctgcacaatcacaagcatattgaccagactgtaaaaaaacaggattccatatatgatatattgttctctggaacaggctgcttctgtcctttttatcaatctgtttatcaaaacatagtataggaatatcattattagttttgaaaatgtcacttccagacaatattgcatgacaacatcaatatttgatattccacaaatctgcaaaaaacagtgtaacagaagcactcccagcgtttcacatacagacatacataaaaccagtacttcacactcagtgattctacggattggtctgtctgcatcttcgtaatacagaaaatataccgttacaccaactccaacaaaccatatcagcagattcaatattgcaaagttcagcatatttatgccaaatgcagtgattcccatcgctatctctgccgctatgtacaaagttttattgctgtaacttttcttatatctttcattcataaattgaaaaagaattgtacagataataaaacaggaaagtccattacatatcgcaagtaaaatcttatccatcttctattctctcctctgggttttctgcaaaaatttattcatttcttcccggaaatcagagcttcttttttgtgcaagggacagttctttcccattgtccagataaatatgaaatccctgtatcttctcaatatgtctcagatttacaagacagcctctgtgatttaccgcaaaatcatatggttgtaattcttccacaaggttttcaaatgtacattcacattcatatctgcaatcttccagaataattgctgcttttctggatctttttatgtactcaaaatataatatctcgtttaatttcaaacgcacacaacctgcttttgttcctgattcatctagtatttcaaattccttttctatttccgaacatttctcctgccccagaatttccataatctgcgttttcatttcttcttcattgatcggtttacacaaaaaagaaaacgcatgtaccttattaatcgcctgtgccatgtattcttcataactggtaatgtatataatttttatatcatgatttttttctttcagctttcttccgagcgtaattccgcccagttcttccatggaaatatccagtattccgatatcaatcttgtcattattgttcagcagctcattcgccgatagaaatgaccgaatctgatattgaacctgatattctgaaagaattttatccagcatcagcgccgctttgtcaagatcttccttatcatcatcgcatattgctacttctaacaatccattctcctccctgtaataacttttgtttttctattataccatatcggcactttttataattgccgatatggtatggtcatcaaaattatttttaccttccctctctgcctcgtttccttgtaccctgtctgccatatgccttcgttctgctgttgggaaaatcccggtatcaacatatactttgttttcccctgcaacaacctctgcgatatgtgcatcattatctgccataagcagtttttccgcttttgcactcgcattctccaaagcttcttttatctcagcctcctgcacctttgcacggattgcttttgtttttggcatgaactttgccctgcgccgcctctgatacatggcattgcgctcacgaagtctttgtttttcctttatttcagccagttcttcttccgtcagttcctgtgccggaagttccactttaccgatgaagttaaggtaaatctctatctccatcacacgctcgccatcaatcttttccgctttgtggacaagtatcttatccacaaattcattgatgatgacaggtgttaattccgtgatatccgtgtatttatggactagtgccagaaattcctccgtccggtctgtatcctcgtcatactgcgtaagctgctccctgcatgtcttaatggactgctccagttctgcctgttccttttcataccctgccgatagcatttcatatcttttgtcaggcagtctgccaagggcattgtcctcatacacttttttaagaaggatatcaagctctgcataccgcttctcctgatgctttaacgcagccttcagcttcttcgcctcactctgttcccggatttctgatgcactgcggattctttcgacaaatgctctctcat

SEQ ID NO: 5191 - DNA, 33050 bp, Unknown
  gut microbiota DNA sequence
cgaaggaattgatatcagtattgtcagcagctacgatcagcactggtttggaataaatgtaaggggtggaaaaatcgaatttttcttttctctcatctgtgatcgtaacctggttcatgacaacgtcaaagttgccggcatcaagtgcagcagtgatggaatcccactctgtctcaacaaactggacatcatagcccatcttttcaccgattgcatttgccatatcaacctcaaaaccggttaaagtaccattttcatcgtggtaggtgtatggagcataagttccctccatgccgacagttaatacaggtttttcagcagaatcagcagaacctgtggattctgttgaagtttcagctgtgttctgtgcattgtcagctgtattatttgcagaattacctgctgtattgctgttagaaccgcatgctgccattcctgttgctaaaacggctgtcagtaaaattgaaatcacttttttcttcataaaacttgtccctttccttttttcataatctccatcttgttttcttaattcatactattctgatatgatttagaaaagattatacttttatcagataatgatgtcaagtgatttgcaaagaaaacattttggtttgtaaaaaaatacggtaacaaccttgctatacaggagaaatgaagttattcctgtatcggagaaagaaagtttttcagttcttcaatcgggattggttttgaaaatttgaatccctgcagatagtccgcgtgactgttcacacagatggtctcctgctcatcggtttctacaccctcatagagtactttgtacccgagttttttaaaagcagtggaaaagtagttcaggataaactgggaattttcatccttatttgccatcagaagaaggctgcggtcaaattttacaacatccagttttaagctaagaatccggtcaaaattagaatatccggttccaaaatcgtcgaggtaagtacatacaccgagggatttaaactgcattacacggtcaagaacgagttcgtattcggtatcgttgcggctctcggtcagttccactgcgatggtatgaaaatcaacaccgtttctttctacgatctgccggaactcttccataaaatttttgctggagagctctgaaatggaaaaatttacggaaacacgggagagctggtaaccttcatcctgaaattcccggatcgcacggcaggtcttatttaaaatgatcatgcttaatttgtggatatagccattcttttcagcgagcggaataaaccggtttggatataccatgccggtgtcctttagtttcagacgcatcagtgcttctgcggtgtcataattgccggcatttacgttgcggaccggctggcagtatacaagaactctttcgtcatcaagggaaccgttttctgcaatatcttttaactgcgccgagagatatttcatatcatgaaaacttttataatcggcggtgtcgcaggagcggaaattatttagttccatcggttctgcaaagaagttaaaaagttcgtaaaactgctctaagttttcacagaaatccagatgattgaacataacgatcttataaggcagtttataagtttcaaaatggcgtttaaagtcattctggatcatatcctgtgcgattttatctgcattccggatgtcactgacatcaattgcaagaacaaaaaaatctgtagatgggtggaagaggagtccgtttttaaagtagccgttccagaagttgaaaaaaagtttgccaagctcatccggcatcacatattcggaatcagtgtcgaaacggagacacatataataagtagaaatttgaattgacgcctgctggtttaaatattcgtttagggaatcagcattcagggcccctgtcttgatactgtaagaacttccatgtaccatataaaggattaccatgatcggcaggagaaaggtgatggcaaggaaggtattgctgccaaaatggttttctgcacagacgagaaaaacacagatgaactgtacgatcacgagcatatggaataaacttgttggaatgcgtttatgatagtaaagtaacaggaaaaaaataaacgccatataaatcccgtaagcaatcgtaaacggttttaaataaaggttatcatgccatgcacctgagctgtcgcggtagaaactgtaacccaatacaggtgacagtgcatccacaacggcaaaaatgatatataaggaatataggaaaatattcatgatatgtcctgtttttcccggaataccaatcaaaatctttaaataagccgcatacagacaaaaaatgagcagcaggcttgaatgatatattgcacgcagaatacataaagtggtatcactgtcgaaatacagtacagtatagtaaaagcaggaattgctgaaggctgcaatcagcaaaagcgcgatgcaggtgcgaaaaagcagaaaaagtctgctgcggcggataaatgtctcccggagaagcagtaaaagtaatatacataagatcacgagaatcatatctacagcgggagtgtacccgttgatcaaaaaagcgttggataatattttgggttgcagattcataatttcattcccctgtaatcagattaaaagtaatttagccgaacaaaaattataccataatatgggaaaaatgtcacgggatcgcacatgttaatgttgaccaaaatgacagtatgaatgtcgaaaaaatgtcacaaaaatgcatgctcaggttgacgttaagacagcaaagttataaaataaaaagcgcaaccgattgcgctatattggagagaaagaatgttgctgaagcagtcagccgcaggtaccttaagaatatagagaaatcgtggaaaaaagagcaaatttatggaggggagtgtgaaaaaattttttcacacacagaaaaggtgaacattatgaaaaaacaggtttacagaaaactactggcggcatgtgtcagcgtaagtcttggaactgttcttctggcaggatgtggggattctgccggaacgacagggacaaagacagaagtacaggagaacaatacatcggaagatgtggttgagccggtgggagaagttacaacattcacgctgccggacggaccggaggagtctgatatttttgtgcaaccggttgcggatatttcggatgactttatccggggaatggatgcatccgcggttctttctgtggaaaacagtggggctgtgtattatggctacgatggaaaagagcaggatgtgtttgagacacttgcgcagtccggagtcaattatatccgcctacgtgtatggaatgatccgtatgacaagaacggcaatggctatggcggcggaaacaatgatctgacgactgccatgaaacttggtgtgcgtgcagccagatacggaatgaaggtctgcattgattttcactattcagatttctgggcagatccgaaaagacagcatgcaccgaaggcatggaaaggtatgacagtcgatgaaaagagtgatgcactctatgattatacgacagagagccttggaaagctgttagatgccggtgtggatgtcgggatggtgcagatcggaaatgagatcaataacggtatgtccggggaaacagatgtggatgccgtgatgcagcttttaaattccggaagtaaggcagtgagagaagtggcagagtcttatggaaaagacattaaagttgccgtacattatacgaacattgaggataatgaccagatcgatacgatggcagcaaatttaaaagatgccggtgtggactatgatatgtttggtctttccttctatccgttctgggacggaaccaatgaaaatatgcagaacgcagcaaaactgatcgaggataagtacggaaaagaagtatatattgcagagacttcttactgttatacatctgaggatggagacggttttggcaacagcctgaaaggaaccgatgacctgacagacggttacggtgcaacggtacagagtcaggcaacagtgatccgtgatatctgtgcagccgcaaatgaggccggagtggaaggtgtcttttactgggaaggcacatggatccctgtcggatcagccgatgcggataattccgctctgtgggagaaatacggaagcggttgggcaagcagttattcggctgagtatgacccggatgatgcagggttatactatggaggctgttcctgggacaatcaggcaatgtttgattttaccggacacccactggcttctttgaatgtatttaagtatttaaaatatggcgcaacagcgccgcttgcagttgactatatcccggatgtttacgtctcctgcaatgtaggcgaagatctggttctgccggagagtattgatgttgtatacaatgaccgttcacagaataaaaaacaatctgtaagctggaatgagacacagatgaaggcaatcgataccacgaaagccggcagttatgagatcgaaggggcattggaagagggaaccactgttaccgcgcatgtggaagtggaaatggtaaattatgcggtcaatccaggttttgaagataaaaaccgttcaatgtggaaagtctcttatgaaggggaagccgatccgactgattatcaggtaaaagcggatgatgcacattccggtgagaccgcatttcacttctggtccggggattcagatatggaattttccattgagcaggaagtgaccggtctggagaatggaacgtatcagttgtctgtattttcacagggcggtgatatgtcatcggatgcgtccatggaactgtatgcagtgactgcagatggcgggcagacggctccgtttatgctgaccacctacaatgactggcagaatccgacgatcagggagattaaggttacggatggaacggttaagatcggggtacggtttcagtgtaacgtgggcagctggggaacagtggatgatttcacactgaaccggatttcggactgatagctggtatcgctgatgagaaggagatgggtaaaagacgtgctttttatttaggagcgcttaatatgatacagtggtggcagcagattttgccgatttggaatgcgaagcatcagcaaaatccgttactggaacgaggtacgagtgaacagtaacatgttaaaatcaggtccggacagatttctagcataatttctagctattcccctttatttgtgatacactggaacaagagtgtatcgtgaatttttacagagaggataaaaagctatgcaggattatgatgagagtttttttattgcgaaagcaaacaagagggcgagtatcacgtggtttgtacttttgctgatagcgtccgtgttttacggaataaaagtcggcaggggacagttaaaggaagcgtattttgcaggcttttttgttgcaggctggctgtcgtatcttggcggcaggatcttactgagatttaagcatgctgacagtctgcggtataaatgggtggtaggacttggctacctgatattttatgcggtaattgcgtggacatctttagatgaagtttcttatgtatttattttaccgttagtatgcattctgatcctttataaagatccgaagtttatccggacaatgatgggtatcacgttatttgtactgatttcgagtaatctgtataaaggtctggcaaaaggaatgatggatttcgtcgcaagcgaggaatgtgtcctgcagtttgccattgttatctgctgttatgcctgtaccaatatggcaatcgcccatctggtacaatcggatggtgcactgacggcatccattaaatccaatcttgcgcgcgtcgtaaagaccgtagagcaggttaagggcgcgagcaatgagatcgtggatggtgtgacggttgtgagagagcttgcagacgagaaccgtaccggtgccaatgatgtaatgaaagatatgaaaaatcttgcagacaataacgaagtgcttaatgataagacactttcctccgtcgagatgaccaatgtgatcgatacgcaggtaaaaaatgttgcaggactcatggagcaggtggtacagctcatcggggcatcggtggatcatgccaatatcagcgcggaagagctggttgaggtggtggagatcaccaataagatggcgacactttccaaagaagtagagcaggtgcttgaggactttaaggctgagtttaagaatgtaaaagaagagaccagtacgattgaaggtatcacttcaaagacaaatttacttgctttaaatgcatccatcgaggcagcgagagccggagaagccggcaagggatttgcggtagttgccaatgagattcgcgagctgagcagtggaacacaggcttcctccaacagtattatggaagcattgtcaagactcgaagcaatttccgagaagatgatgaagtccatctcagagaccgtggaactgatccaggtcaatattgaaaaagtatcgaatgtcaaccagagtgtgacaaatattacaaacgatgcgacaagccttggcgaaaacatcaaggtcgtagacagcgcagtcaaagaagtggagacatccaaccagacactgacggacaatatgcatcaggtcggcgaagtcatggaagtgatgacacagagcatcagtggtgcggaactgacaaccaagacgatgctgagcaaatacgaggcgagtgcaaagagtgcgcttgatatcgagagtgttgtcggcaaacttatggaagaactcggcgtcggcggattcatgggcgtacaggatgtaaaacctggcatgaagattacgattgcattaaatgatgacagcagtaaaaaagagtatgccggcgaagttgtggactgcagtggcaaagatctctttgtaaccgcagaaaatggagtgaaagactttgttgataaaaagaataaacatgagttatgtaaactgcatattgtagttgacaatgtcttgtattactgggatgatattgagatccatccggtcagacagggtgaaaaaggtcagtataaactgcatattgaatccaatccgaaggtatataaccgaagaaaatatcctcgtatgccgatctctaatgcatgtaccatccgcttagaaggaacagataaaacatattccggaaaaatggtaaatatcagtgcaaacggttttgcattttctgtgcgtgataacgtttttgcaagccagacaggcagaaatgtccagctggatgtgaaagattttgcagtgatcggaaataagccgctgaccggctgcgtgatccgaagctccaacaatgagggtgaattcatcgttggatgcagaatgccggaggacagcgaggcaattaaagaatatgtgagcaggaattacaatgggaattagagaaaaacagaaataagaggcgaaatatatgacggcagaagatatcaaagcatattgtctcagtaagcacaaggcatgtgaaacatacccgtttgggaaagtgccggtctgctacaaactgaatgataaaatatttgcgcagttatatccggatgaggaaaactataaaattacattaaaatgtacggcagatgcagcacagttttaccggatggtctatccggataagatcgtggaagggtatcattgttcaagggttcagaaaccttactggaatacgatctatctggatgatttcccggagaaggaactttataatatgatagattttgcatatgataccgtattgcacagtttcagcaaaaaagtgcagaaacagatactggaaaatgtatgattggttatggggagaagagtgaaaatgggatcagattatgcagcgttaaaaaagatattatatatactgacaggactgacctgtgccggaatggtgattgcagatgcgtttacaaaaccggctgagggtggagagatacttatcaatattgtgttatcgttttttttctgtctgttagtgcagtattttacgccggcaatcttactgatggtgtctgtcgggtgtcttgggaaaaggcagatagcagcgctggtttttgacattcttgctgtgagcatggcggctattatgctgtcggcgggttactttctcagctatctggcaaccatagagtcaccacatttcagctatgcatttctgggaaatggtgtgattctgcttctggcgactgtgcagatggtttttgtcattatagcgatcagaaaacagaaggtaaaaccggaaatataaaaataagagcaggttttggcaatggataacaatttgataaagatacgcaaggcaaaaaaagaggatatggagcgcatccatcatctgcggatcgatacgcatgaaaataatcaggtgatgcggcatagataagaatgtccgcaagagcgtgcattctattattttataaagtttccgatcgtctgcgtcatttttttcatatcgatcggttttgtcagatgggcgttcataccggcatccagacatttttttgcatcctcaaagaaggcatttgcagtcagagcaataacagggatcgtggaagcgtcagggcggtttagggaacggatggtcctgcaggcttcaagtccgtccataacaggcatcatgatatccatcaatatcacgtcaaacgttccgggggcattattttcgaaaatagttaccgcctctttcccattgcgggcaggggtgataatggcaccctgttgttccagtaattctgtgacgatctcaagattcaggtcattgtcctcggcaagaaggattttgacaccgcggatcgaagtgacggcactgtcatccgtgacttcggaaacagcttcctgtggagcaatctcaaatgggatcgtcacggtaaaggtggtcccgacattctgttcgctttttacttcaatggttccgttcattttatctacaagtgatttcacgattgacattccaagaccggttccctgaaaaacacttcttgcatctactttttcctgggaaaacgggtcaaacagatgtgacataaattcagggctcatgccgattccggtgtcttgaatggtacagatatatgaaatatttttctcatcacaggcaccactttccagtttcacataaatctccccacctggtttattgtattttacagcgttatttaagatattcacaaaaatctgccgtacatgcagtgtgcttccgtagacatatggatgcggcaggttataagaactgctgtctaagtgcagtgtaatgttattttcttttgcaagcatttcagtaatcgttaagatatcgttgccaaggtgccgtacatcgaatgcagtgtgcgccagttctactttgttatcctctaacttgctcatattcaaaatatcgtcgatcagtgtcagcagatgatttgcggcaactctcatatttttccggttctggtctaaaagttccgggttgtttttgttcgcctccgcaatagtaagacagccgatgatgccatttaacggtgtgcggatatcgtgggacattctggaaagaaaatcggattttgcagcattggcgcggtttgctttttccaaagcatctttcagttgtatttcgcgttctgcctgtaaatgagcgcggtgtttttcaccgatgatgataagagacaaaaaaatgaaaaatgccagcgaaataaaaaatatagtctggtaagtgagtgttttgcttgtatttgcggtctccatgcagacggaatcaggggcaaatacgaggatctcccagtcactgtaaccggttggggcataggacagatacatggtttcgcctttttcctcggagagaaaggcggcatgtccggaattgccggcatcgtaattggcagcgacttcattccagtcatatccgtcgagggctgtgattccgttgctatccgaaatatttccgagattatggtgccatgagtcgattaaaatatcgccggttccacgctcaaaaagcataatttctgattcctcgttataagcctttgcctgaaaaagcctggaaaatgaattcagatcgatgacggaggataaaataccaacacagtctcggttatgaaaaatgcattttgagagcatgatgatctgtgattttccgtctttcaatgccgttctccgctcagaaacggaaaaaccttcctgcacacgttcctgaaaggagtatttcggtccgagttctaattgggttccatcgctgtaaaaaactctttcatccggaaggcagatttcccagtgggagtaagttttatctgcactggaggcattcatgatctgaagaatcatttcttcattgttgtcataatcaggcagcagattttcaaggagagcagaagcggcttctaaatgctcctgctctgtctgcatttcattggtgatcatttgcccgagcagcgtcctcgaatcgtctaagatactgaagcattgattcgttgctgttttctggacaatggaagtgtagcggatcagggcaaatgtaatgacaaggatgagtactgccgtgatctcaagataaaagttttttttgctgagcagttttttcttcatgtaagcctctttcgtatgaacggtgtgaatcctatatttattcattatatcactttagtaaaataaagggagaaatagtttttgtatttgcagattataagaactggtggatataaaaatatccctgtacaatcctgatattgtaaggatttgtacagggatatttttgatcccatgattaaaaatggttaaagtgtactgtatccggtctacatctccaataactggaatgcaccgatcagttctttgagtttttcggactgggcagcaagttcctcactgcttgcagaactctcttctgccatagctgtattttcctgtacaactgcggcaatctggtttgcagcttcggaaatctgggcaagggcctcagactgattctcggaagcgttggagatctctgcaatgttttcaacaagctcgtttgtcttgcctgcagactccatcagtttggatgcggtgtcatcgacgatctgttttccttcgtcaaccgcattcattgcctgcaggatcagagagctggaattctttgcggcttctgcactctgtgcggcaagtgttccaacctgggttgcaacgacagcgaatccctttccggcttctccggctctggcagcctcgatggaagcatttaaggcgagcaggtttgtctgggaagcaatgtcgttgatcgtattgatgatcgagctgatctgctgtgagctttcgttgatcgtctccattgcatgtacgacctgctgcatctgctcgttgctctttgtgatctcatcaccgacgatttttgccttttcatttgctgcgttagcgttctgggcattgatctgtacctgttcagatacattcatgatcgtactctgcagttcatccacagaacttgcctgatcggtagcaccctcggtcagggactgagcaccgtctgcaatctgggaggcattggaagcaaccagctcggatacttctccaatctcgcggagcgttttggataagtcaaccagtacggttgagagggcggtttcgatctctttgaaatcaccgacatgttctgcctctgctgcaatgttaaagttgccggctgccatttcttttaaaccacgggtaatatctttgatactttcacgcagacgtgcagccattacatcgaatgtctctgcgagtccaccgatctcatcatggtaggtcggctgtacagaagcattgaaatcaccgtcggaaagctggcttgccacagtgacaacgtcatcgatcggcttgatatatttacgcagcagtcgtgaactgatcacaataatgataagtaccgttgcaatggcaagtaagaccataattacgacgagtatcaatgtattgcggtttaaatctgttttggtaagtgcacttgcagcccaccaggtctgtccggcagcatcaattggcgtaaagtatcttacgatctggcgatggttgcttgcctttctggtgctgaccgtaaaacttgatttggtgtcgataccagactggatctttgcaaaatcctttgcagacaaaagatcctgtaaggactgtccgatgcagtctgtcgattcgctgtcaaagaccatcatggcatctgcgttgtaaatgtccacatacatacttggatatttggagtctgtggagactaacatatcactgaatgcagcaagattgatatctacaaggattacaccctggacttcatcattatagacaatcgggaaagaagcgctgaccatgttgataccctgatcttcatatggatcggtaaagcagtcctgcttggtctctgcagctttcttatagtaatcctgtgatccgtaggaatcataacttccatagctctgtacggttccgttttttgcatcatcgacactgacatagacagtgtaatctttgaccgcaggatcaaatgcgttcggttcaaagaagacaccgacaccatcaatggcttcattgttcgttacggtagaagcagccatactgattaaaaattcttcgatccttttgttcatttcctgcaggtcgacgtcatagacttcactctttgccacttcgccgctgtatccgtttttcgaatactcgtcatagcggtcaagcatgtagttctggatcgtggttgctgtgttggaagcagtatcgatcacactctgtactattaaggcattctcggttgcgatgccgttaaattcaccgctgacggtcttgtttaaggaacgtccggcgatgactgcactgattaagatcataagagacatacagatgacaagaagcagtgcgacagcgacagacagcttgtatgcaagcgggcggtcgtggaattgcagtacagcggaggctgtaccggtgttacttttgtttttttgttgcttgtcttttgacattttaaagatattcctcctctggaaataaaaggtttaataatattttagtaccatggtaacactttttttataattatacaatgcaaattatggaatgcttttgctttatctttacaaatacacaacaaaatgatatatttgattctgatatgacatattaataaatctaaatgatatacaaatgatatactaaaggaggaaaaaatgaagctggggatcgatatgggcggtatgtccatcaaaatggggctggtaaatgaggaaaacaagatcattgggaggattacgattccaaccgatctgacggtgccgtatcagacgctggtggagcgcatggcagatgccgtacggcagatgcttgaaaatgcaggcatgacattagaacagtgcggggggattggaatcggaagtccgggaacgatcgatgcaaagcagggagtgatcctgtattctaataattttggctgggaaaatgtaccaatcgtggaagaactgaaaaaacatctggatacaagaattgaaattgccaatgatgcggatgctgcggcgttgggagaagtatgtgccggtgcggcggaaggtgcagaaaatgcagtgcttctgacacttggaaccggcgtgggcagtggagtgatcctggataaaaagattttccgtggtgcgatgccgggaggctgtgagttaggacatctgtctatccgctatgatggcatccgatgtacctgcggaagaaaaggatgcttagaagcctatgcctctgcgtctgcacttcttcggatcgcgcgggaaaaggcagcagagcatccggagtctatcatgaatgagatgtgtgggaatgatctggaacagatgaatggtaagatcccgtttgacgctgcaaaagccggggatgaagccggcatggaaactgtaaaagaatatgagggctatctcgcatgcgggattgcaaatgtgatcaatacattccggccggaaaaggtgatccttggcggaggagttgctgcgcagaaagacaatctgaccgcaccgcttaaggatctggtgaaggatatgtgtttcggtggcagccatggacatattgcggatatcgtgacctctgtacttggaaatgatgccgggatcatcggagcagcaaatctggtagtgtaaaattgtagtgcacggtgtcacagaaagcataacggaggcggcaatgggaaaaacaattatgtatgagcggatctatggggatctgcttgcaaaaatacagagtggagattaccagccgggggaccggctgccatcggagaaggagttagcagagctttatggtgtaagccgtattacggcgaaaaaggcgatggatatgctggcaaaagaaaatcagatcaacagagagccgggaagaggttcttttgtgtgcaggcccgctgctgttgtggagataaaaaaagaaagccaggaggcagccaatcagcggatcggtgtgatattcgacgggtttggaagcgattttggcacacggcttttgcaggggatcgagagtgaatgtgacaggagacagttagaccttttgtttaagtgtacttatggaagcatcgaaaaggaaaaacaggcgatcgacgcggcgatccgtgcgggagtaaaaggtattctgcttctctgtgcacagggggacaattataacagtaaggtgttagagctggcgctggctggttatccgctggtgcttgtggaccggcggatgcagggcatttcgatcccgtgtgtcagaacggataattatgaagcggcgaaagaagtcaccaaaaagctgatcgcaatgggacatgaaaaaatctgttttctgacgcatgcatccgtcacgacgacaacgatccatgagcgctacgaaggatttgtccattgtatgctcaaatatgaggatgccaacggggcacttgcaaaactggaaaaatataaccacattccagaggacatcgaaaaagaataccgggaatttgactatgcgcagattgcggagatcctggaaaaaaacagggactgtacggcatatattgccgctgaataccggatcggggtactcctttcaaaatatttaaaacagcggggaatctcaaaaacgattgccgtatttgacggcattgatgaggtctatgagcaggatgactttatccatgtgcggcagaatgaatttgcgatgggacagcaggcagtcacgcttttagaggaaattacagccggaaagaaacagaccgaagatattctgatcccttatcagatatcggggatcgtgtaaaacaggaggataagatgaaagtaaaagaaaattatgcagcgatcgagcgtacggtcgctcttgtaaaagaaaaatttggtgcagacagcaagatcgctgtcatgtttgaaaaatgtatttcgaatacgctgcagacgaccattaaagtaaaagaagatgacacggtatttgtgatcacgggggacatccctgccatgtggctgcgcgattcggcatgccagctccgcccgttcttattgtttgcaaaagaagaaccggagcttgtggaactgatctgcgggttgatcaaaaaacagatgcagtgcattcttttagatccatatgccaatgcatttaatgaaaacggcgacggacagtgctgggatcatgacaagacggatatgaaaccggagctgtgggagcggaaatatgagatcgattccttatgctatccggtgcagctttcctatctgctctggaagaatacaggatgtacggagcagtttaccggagaatggttagaagccgcaaaaaccgtgatccgcgtattccgcacggaacaggatcatgaaaatgcctccccgtatacatttgaaagagaaaactgcagttttaccgataccctctcaagggacggaaaaggtgcgctggtaaaaagcaatgtcggactgatctggtccggtttccgtccgagtgatgatgcctgtgtctatggatatctgatcccgtcaaatatgttagcttctgtgatccttggaaatattgcagagatcgcccgtgagatctaccatgatgagaaactggcagaagaggcagatgctttctcagaggaagtgagaaatgcgatcgagacacttgccattcttccggcacagaagacggaatactacgcatatgaggtagatggttttggccagtatcttgtgatggatgacgcaaatctgccgagccttcttgcgatgccatactatggctattgcgacaataaaaatgagagataccggaacaccagaaaagtgatcctaagcgaccagaacccgtattatttcagtggagagtgcgcgaagggaatcggaagcccgcatacatacacacgtttcatctggccgatggctctggcaatgcagggacttacctctgactccatggaagaaaaattaaaaatgcttgagaggatcgcagcctgtgatgcggggacagatctggtacatgagtcattccatgtggatcacccggatgattttacacgtccctggttttcctgggcaaattccgtattctgtgaacttgtactggactattgcggacagaaagttaccctttaaaaacgaaaaatatttgtgcctgcgcacaaacctgtgataagaatgaaaagcaggggggcgaaaatgggcaggaatggagacttttgtgatgccctgagatacgggcaggaatggagactactatgaaaaaagcgcatattatttctcatacacactgggacagagaatggtatcttccatatgaaaaacatcatatgctttatattgaaatgatggatacgctgattgataccatggaaaaagataaagaatataaatgttttcatctggatgggcagaccatcatgctggaagattatcttcaggtacggcccgaaaaccgtgcacgtctgcagaagctgatcgaggatggcaggattgcaatcggtccatggtatgtattgcaggatgaatttctgacaagcagcgagtcgaatgtcagaaacttacagatgggttataaacttgcacaggaatttggcggaaagtggacaaagatcggatacttcccggattcctttggaaatatgggacaggcgccgcagcttttaaagaaggcaggcattgacacggcggtattcggaagaggtgtaaaaccgaccggatttaataatcagacaacagaagcctatgagtccacttattccgagatgaactggcagtcagcagacggatctgcggtgcttggcattttatttgcaaactggtacaacaatggcgtggaagtgccggtggaagaagaaaagtcaaaagaatactgggataaaaaacttgcagatgctgtgcgttatgcaagtacggaccagcttttattcatgaatggctgtgaccatcagccggtacagaccgatctgtcatctgccatccgcacggcaaatgcgctatacccggatgtggagttcgtacattctaattttaccgattatgtggagcaggtaaaaaaggaactgccggacgatctgaacacgatcacgggcgagctgcgcagccagaaaacggatggatggtatacgttagcgaacacagcatcctcccgcatttatatcaaacagtggaatgtccgctgtgagatgctatttgagaaagtggcagaaccgctcgctgcgattgcggcaaaagagggtatggaatatccacaggatctgtttacctatggctggaaacttctgatgcagaatcatccgcacgacagtatctgcggatgcagcgtggatgacgtacaccgtgagatggtaacccgttttgaaaaggcagaacaggtggcgctgcacatcatttccatgtgtatggactatctgaaaggaaagatcgataccagtgcagtgaaggaaggaaacattccgtttgtcgttgtcaatacgaccggctgggaccgcacaggcgttgtggaactggagttagaaaccgaccgcatgtatttcagtgaagcgccggtagccgaagtggcagcgcgcatgcatgaaaagaaactcccggaataccgtgtacttgacaaagacggaagagagatcccggcggttgtcactgaaattgcaaatcattttaattatgacctgccaaaagataaattccgccagccatatattgcaaaacgcgtaaagatcaccatggaagcagccgatgtgccggcatttggatgggacacttatgtgttggcagaggcagcgggacatcagagtgcagaatatgcaagtgcagaatgtatcaatactgtggagtcattgatcacagcagaaaatacactggaaaatgagtttttaaaggcatactttaatgaagatggctctgtggaactgactgataaaaagacaggtcatgtatacaggggacttggtatctttgaggactgcggggatatcggaaacgaatatattttctttgccccggtaaatgacgtaccggtgacgacaaaagggacgaaagcagagatcacagtggcagaagataacgcatgccgcgccgtgatccgtgtaaaacatacgatgatgctcccggatgcagccgatgagacgctggcaggagagatcgaggatcttgtagagtttaaacaccgcaaggcatcccgaggcagtcatctggttccatttgagatcgtgacagagtataccttagagaagcacggaaaaggactgaaagtaaagaccgctttcaataaccagatcaaagaccaccgtctgcgcgtcctttttgagacgggattacatacagatttccattacgcagattctgtatttgaggtggcaaaacgcccgaacgtaccggcagatacatgggaaaatccttgcaatgcccagcatcagcagtgctttgtcaatgtgcatgaggatgcatatggactcaccatcgccaataaaggtcttgcagagtatgagattttgcgtgacggaaaaaatacgatcgcagtaacacttcaccgtggtgtgcgcgagctgggagactggggtgtatttttaacaccggaagcacagtgcctgggcgaaaagaccacggaatatgagatcatcccgcatggcgcaggggaggaactttatcattcctacgaggaggcataccagttccagacagactggcagaccgcgggaatggaaagacagacgggaaccctgccgcagacttaccggtttgtagaaaagaaacatttacaggcagttccgacagcattaaaacacagtatgctgaccgggaatgtgattttgcgtttctgcaacctttcggatgaagagacgacggtttctgtctcacagcctgaagtttatacctatgatctgctggaaaaagaccagttacagaaagaagagaaggaaatcgtattaggaaaacatgagatccggacgatcggatggagagcataaacagagatgacgcacaaaaaaggactggcagtaagctgataaaaattcagcaatgccagtccttttgtgtttacagagtttaaattattttattccataaacttcaatctcataaatacgcgcagcactgtcgcttccctgtgtaggtttatttactacgagtttcacataccgtgcgtcttttggtgtaaatgcattgtgcgtcgtgccatttgtattttttgtcacgctgtatacttcttcaaaactatttccatcctggctgacaagaatggtataagatttcgtgttcatgtctgcactctcgccacctgcttctgcatggaaaatgtcaactgcacttacggtattcacttcgcctaaatcaagggtaatttcatgaggtgcagctcctgttgcacaccatttcgtcgaaacatcgccatctaccgcaaactccggcgcttcgttttcatttacatatgcgtctgcttcggttcctgctccctgggaaagaagtacaagaccatctgctgcatctgaggtgataacaatatagccttctttttctttctcaatgcttccagccttattcaccgctgttaccttaacattgtagatgccctcttctggataagataccgatacgctctcgccttctgctgtttcgatatctgctcctgcaaatgtccagtttacggtttctgtatttgcagagcataaactttcaaaagtaatcttcgtacctggtgcagccagtgttacatctgctgcaaaatctgctttcggcagactgttgtctggccaatccataacgacctgtgcactgtttccctcttcaaaggctgcattgactggaacgacctcaaaggcagacttgttggtatcatctgtacggggaagtgtgttgatatagaaactggttgtgttggatacgccaagcagggatctggaattatcctgattcacccggtaaacttcataataatcagcagctgtatctgaattccacgcaagacgtacacctgcatacattccatcttcatcaaactcggaatctaatacttccagattgcttacggctgcattttcttcggaatctgcctccatcattgtgatgttaccgaaacgtaactgcagtccgctcacatcttcagcagaagttatctcataagagatggatttgatcgtctttcctatgatagaagaagtatcataagagacaacggtccattcctcaccgacgttctggtcaccctctaatgtcacaacagaaccatcttctaattcaagtaccgcatttaaagtaatttctgttccctttgcctttgcagcagtcgtatagatcatattgtctgcagcggtaagttctgcagcatataacttaattgtggaagaggtatcttttgccatattgcctcttaaaatgaggcttgttccaccatagtaagcatctgctacatccagatcagcacttaatttattgccgtcaccgttttcaataatataacggtaggttggcataatatctgcgatgctgcggttgttccagtcaagtaagcttatctggctgccgttcttaaagaaactgtaaccattccctgtagagaaatttgttacaaacggtagagatgtcagaggcgtacgctctactatataagaggaaatacctttccactgtgtgttactgagttttttgacatctgcggatggatcacccatggagttgacccagagtttattttcctgtttccagaaattctggatcgtatcagcagaagtataagcccagcttggacagtaaagtcccagtgaagtataggtcccgcctttttcgttttcgaataaatcccatttaatttccgtatgatagccctcgctctggatatctacacccgcatagagatcataagggttgataccgttttcggaagcaagtgcggcagacttcttcagaagttcctgatcggaaagggtgtctgaagtccaccagaaatttaaaaacattgcatcggcgacgggttctccgtcttcggacacaagataagcaaggttttcttctgttaaggcattctgccaatccatcctgccgtccacggtcatggaatcatagtagaccagatccagatccggtgcctgctctttgaaatattggataaattgctgcatgcgcgccgcatggtctgcagtcagcggttcttcatcggttccttcggtttcctgattcatgaaccagccctcaaaaccataagtctgcgcaacttcaatgagtttgtctgctaccggataagagccatcttcattttttacaagcaggtcttctaaccactccattttaccgccatgtgcggtctgaggcatgaaaacagttccaagaactcttacgccatttttatgtgctgcatctacaacgtcagggcttggcgatacaatgagaccttctccggaagaaccaccccagtaaaccagcgtatccacatactgccagtaggtgaaagtatttgcattcactttattcagaccatgaggcgggtttccactggtactgctgttcataatggaaattgccatgatatttgtttctttgttctgagttgagtttactgtctgcaaatgttctcttgcggcgcgctctgaaagggggacggtacttacattgaaacgcaaatcttcatctgtttttgcatcccagcttaaaagttcagatggaaaccagtaagaggattccggctgacgcgccatcgtaagctcctgattttcattctcttccgtaagagaataaattctctctgccgtttgaactgtctctgttatttgagttgtttccgtcgtggcagcttgtgtgtcaccccctgtgctgccacaggctgttaagcctgcagataatgctgctgccagagaaatggcaatgcatcttcttcctaaaactttgtttttcataaaacatttcctttcttttttctcccaccgtcttttcatagtgttacttcttaaacatattttttaactcgccttatcatttgttaataatatgttatcataaagttatctgtttttgttatcaatgtcaactttttgtgttgtattttgtgctttttctctatagttcacaaatataagtttaaatttttgagctatctgcttaatttatttaaacataacaaacaactctgttaacttttgataacattgctatgaaagatgatgaacagaatttgaaaggtcagtctacgatagaatcccggtacacaatttcagggctgatatatgtcagctcgaagggcgcatcaggatgatccatccgatagatgatctgtaaagaaagtctttttcccaggaggctggtgtgaacgtaagcggttgtgagaagtccgttgatgttcgtatattcattgcttccgtcaaatccggtgaggataataccgtttggaatacgctccggatgttctgtcaggtacaggtgaagaaaatgggcaatatagtcacttgcgcaaatgaaagcctgtggaagttccgggatagaatccaaaaaggcatacagatcattatgatatgagaaaataccaatgggatccgtgtgacagatggctggatttaagggaatattatgatctttcaggcaatggcagaaaccaatataccggtctttgttcgtgatcgcgtaatggatatcgccaataaagcctatgttcgtaatgcctctttccagtatggattgtgtgatttcatacatggtattatagccctcgatcagcagcaggtcgccatgtaaagcacggttgccgacttcgggtaccgtatcaaggaacactttagggatgtttaaagtgttattaattaattcaaccattttcgtgtcatatacattcagaataattgccccagagacagttccgttggtcagggcagagggaaaggagtaagaaggtgtataggaggatggcacataagtataaagaaggttaatattatgggttgccagttcctgcgctaatctatggataatgtttgtccagaatgtagaggagtccgggcgggatacgattaaagagactgttttatcctcttgcgggtcgttagggattgcggcgggctcctgcatgaatttggaatatcctaattcttttgccttttgaagtacgctttcacgaactgcttctgaaacgcctgaatgattgttaaatactttccataccgtaacgcgtgagatccccaattcatctgcaatgtcttgcatagttactttactcatagtagaaatactcctttttagatttatagtacaaatagaaaaatgtgtagttgcagtcaataaaagacaggtatgtagtttgaaattataagtacagtatagcattaaagagatgatgtttgcaacaaaaaaaattaacaaatgttaacaagaggcggttcgattaataaaaaacaactgaaaaatagttgaaatgcacaaaatgctatataaaaatatattaagaacaacaaaagtgacgacaaatggataaaaaagttaataaaattattgacaaaatataaaataaaagttaatatttgttcataaacagggaaacaaaagtaaaggaggagactgatgaaagagataaagaaaaagaagggaaaaagacgttggacaagagatgatacggatttaacactgatttctcttccaacttttatatggtttgtattgttttcttaccttccaatgtttggaattatcattgcatttaaagattataaattgagcccggggcatggatttatctataatctgcttcacagtgactgggtgggctggtctaatttcacatatttctttaaatcaaatgccttttggatgttattgagaaatacgatcgtttacaatcttgtgtttattgcactgggagcggccgttgcagtaggatttgcgctgatgctgagcaatttgcggaataaattggcatcaaaagcatatcagacgatgatgtttttcccgtattttatgtcatgggttgtgatcagttatattgtttatgcagtattaacgccggaaaaaggttatttaaataatatcattgttgcacttggtggaacaaagatcatgtggtatcaggaaccgaaatactggccgtttatccttacctttttaaggatctggaaaggcatgggatatggaatggtcatctacctggcaacgatcaccggaattgatccgtctctgtatgaagcggcagttatggacggtgcaaccaaatggcagcagacaaaacatatcacaatgccatgcatcaaacccgttctgatcatgatgctgatcctggatgcaggaaaaatcttttattctgattttggtctgttttatcaggcaacgggtggaataccggcgtccctgtacaacgttgcatctacatttgatacatatatttacaaagcaatccagtcgagcgcaccaattggaaagacagcagcggcttcattcttccagtctgtatgctgttgtgcaactattttgcttacaaactggctggtaaaaaaagttgatgaagacagcgcgattatatagggggatagcaatatggcacgcaacaaattaagaaaagaaaaagaacttaatcagattaaaaaaagcacgaatgtgttttttaatatcatttttattatattatcagcgttgtgtatttttccaatcgtatttgtgttttctatctctatttcgagtgagacatcaatacagaaaaatggatatcagttaataccacaggaactttcggcagcggcatatcagtttctgtggaatgaaagaggaactattttacatgcaacattcatttccattctggttaccgcgcttggtattattttgtcagtactgctgacaacgacgatgggatatgttgtttcaagaaatacttataaactgaaaagtttttatacctgggtgatttttatcccgatgattttcaacggtggtatgctcgccggatacgttgttaatacaaatatcctgcatttgagaaattctatctgggcattgatcctgccgcttgcggtatcgccatttaatattgtgatctgtaaaaccttttttaaaacgacgatcccagattccatcgtggaatcggcaaaaattgatggcgcaggacagcttcgaatttttgcacagatcattttaccgatttcaaagccgatcattgcaacgatcgcactgttcgcggcatttggatattggaatgactggtttcaggcatccttatatatttcagacaagaatttacagacattacagtctatgctgaataatatccagaacaatattgagtatatagcgaacaatccatatggcgggctttcattgcagcagtataaagcaagtatgccgacagagagtgtgagaatggcgatcgctattattatcgtggttcctattgcatgtgtatatccatttttccagaagtattttatttcaggtctgaccatcggctctgtaaaaggatgataccgtgtaaacaaaataagagatatcagatttaggaggaaaattttatgatgaaaaagagaattgtgtcattggggcttgcagcaatgatgaccgcaggattattcgcagggtgtggaaatagttctgaaagccagggggactccaccgcttcaggcagtaaaagcgatgatatcgttactttgaagtgggtcacaattggaagtggaatgccggataactatgattcctgggtaaagaaagtgaatgattatgtcggcgaaaaaataggtgtaaatattgatatggaagtagttgcctggggagactgggataaccgtagaaatatcattatcagtaccaatgaagattatgacattattttcggcaacggaaatgtttatacatctgatacaaaactcggagcttactatgacattacagatctgatcgatgataatatgccgggcttgaaggaacttatgccaagtgactattgggatgcagtagcgatcgatggaaagatttatgcagttccgacctacaaagacagctcattatccaattatgcgatctgggataaggagatcgttgacaagtataatcttgatattgaatctatgacagacatatcttccctgacagatacctttaagcagatcaaaagtgataccaatgattatccggtctatgtaaagaatgatggtctgtattatatctttgatacttatgatcagttaggtgccggatgccaggcacttggtgtaaagtacaatgataaagatgcgaaagtatgctatacactggaacaggatgatatttattcagagttagagaccattcatgagtggtatcaggacggtattatcaatccggatgcatctacactttccgaaggccgtgtatataatgtctggagagtggcacagggatggtctaccgcagcacagacatcctggggtccacagatgggaaaagatgttgaggttgcaaaaattggcgatacgatcttatcgaatgatacagttcgcggttctattaacatgatctctgcaaatacaaaatatcctgagaaatgtttacagttcttagatcttgtaaatacagatacgactcttagggatatgttctactatggagaagagggagtaaactttgagtacacagatgacaataaagttcacaaactcaatgaagactggacaatggcaggttatacacagggaacattctttaccgttacacagcaggatacagacactgtaaatcagtgggatgaagtgaaagagttaaatgaaaatgcagtaccatctgttctgttaggatttacatttgatacatcaaacgttgaggatcagttatcaaactgtacagaagtatggttacgttacaagagtgaagtcctcacaggtgtaagagatccgaaggaagcagttccggagatcaaagaggaattaatgaatgcaggattccaggatgtcttagatgaggcacagtcacagattgatgaatttttagcaaataaacagtaggaagaacagtaaatatgagtaaaatagtaggaaaagcattgccggatatgccatggcaagacaaggacgaaaacgataaacttcctgtatggagatataaagcaaatccaatcattgatcgctttgcgaccagaaattcaaacagcatttttaacagtgcggtcgttccgtttgaagatggatatgcaggaatattccgctgcgacagcagatcgatcagtatggatatctttgcagggtttagtaaagacgggatccattgggatatttcggatgatccgatcgtattccactgtgatgatgaagagattggaaaaagagattacagatatgatccgagagtatgttttatagaggaccgctattatatcacctggtgtaatggatatcatggatatccaacgatcggcgtaggttatacatttgattttaaaacattttatcagttggaaaatgcatttttgccatttaacagaaatggagttctttttccgagaaagatcaatggaaactactatatgctaagccgtccaagtgataatgggcatacgccgtttggagatatcttcgtcagtgaaagtcctgacatgaaacactggggggttcacagatatgtgatgggaaccatcaaaggggacgagtcagcatggcagtcaaccaaaattggtgcaggctgtatcccgatcgagacagaagaaggatggcttgtgatctaccacggtgttatcaacacctgtaacggttttgtataccgtatgggctgtgcactgttagatctcgaacaaccatggaaagtcttaaagcggacaaaaaattatattctggcaccacatgaaatttatgagtgtatgggagatgttccgaatgtcgtatttccgtgtgctgcgcttacggacgcagaaacaggaagaattgcaatttactatggctgtgcagatacagttacaggacttgcgtttacgacagtaaatgaattaatggaaagcatggaaagtatgtaataaaaaacggagttgttacaaaataataataatattatttgtgacagctctgtttttgcaaaaaatttctggaaacaacagtgggagaaaagaatgatagagaaaaattcgggaaaaccatatatgaatgtaatatttggaaatttttacagtccgggatatgacgatccggattttgtggatgagacgatggaactgatcaaaaatcttggttataacagcgttatgtttgacacaaaagactgggaagatttcagggaacgctataaaaccggagaacggagccaatatgtaaaaatgcaggaatatatggggcagtctgcattgaaacatggattaacgtataatttcctggtgttatatttaaatggcgataatttgtacccgcatatccgtttcagtccacctgtatttggggaagaggtcgtgacaatagatcaaaaaggtggaaaatggtacaagtactggtcagatactgcgagagaaacgatggcagagcatgtagaccagatccttcaaatgtacggggagggctgtaccacctgccggttgggacaaaaacaggtccttccaacatgtacgatgtgggatccgattgcagcgccaagttttgaccaggatggaatagaacgctatcagaaatttttaaaagagaaatataaaaacaatatatcgttattcaatgagaggtacgatctggatatcgatgattttaagcagttaaaaccagaggattactggtattctgtgatttatggagagggaagctgttataccggagaggatatcagaaaaagaacaaagaagttctggatatggaaagataacatgtcctggaaaatagaagaactgcggctgtactttaaagatatgcagacacgcctcaaaaaagaccacccggaattattcctttgtccggatctgtcgcagtggggatattttttaaatgtgtacagccagaaacaatgtgacagtgacaatccggattacagtgaattgtgggatactgcaatgcgggggatcgatatgtatgcgatcagtccatatgtggattcctgccatttcataacagttccggcaagaccggatgcgagtccggatgcctatgtcacttcctgccagcacagtatgatgcgcgtgatgaatgaaggaaaagaatgtatcggcggtatctattggggacgttatatttaccgggatctgtatgcatttttaacaccggaagaaattgtgggtaccatgaccgcgtgcggggtagatggctacacttcctatgggatgaacggacttgatgatggcggtgtgctaaatcgcatggaagatgactttttagattcactgagaaggggaaatacctggtgtgcagaagtgattccaaaaaggggaaaaagtaaatttaaagagatcgcaatcctttttccatccgagatgtcagattatgaaccgtttgatgtggaaaataatgagatccgccggctggatatgctggggtggtatgaaatatgctgtgatcttgggtatcagaccgatgtcatcagctatcatgacattttagagaataaattaaacgactataaaatgctgattgttccatccaatgactgttattttgcagaagaacacacagacatggaaaaaatgatccgggaatgggtgacaaatggaggagttgtgctacatggaccagactgtggtttaagtaaaaactgttttggcatccagggcatcccatgtgaaaaaacaccgtacatatatcaaaagcctgtcattccacagggctgtgaatttcagagatatgagacaggcagatgtattagtgcatatgcagacgatgcgggcaaatgtattgttatgcaggaaattgaaaaaggaaaggttatttcctgcggagtacagttaggtgcttcttatgtggcaaagaatataccacatgtaccatatgaacagagaaataaagaaatgtatccgatcattcaggcaagaagtacattgttggaagatctgttaggggtatgtggaaaacctgtttcaggaatctgtgaaagaggcattgaagcaggtgtgtttgagacgggaatggttttggtaaatcatcggtcaacaccgtatgagattggaaatttaaaaggaaaccggaaatttacaaatccagtgaatgataccgtgttattgccacattccgcggtatggatcgagcgtgaataaagagcaggtgaaagtatggcttttataagagaaaaagaagaaatcaaaacggggtttcaggagatagaaccgtggtcatcagagattgaccttcagacggattttgtaatggtctatggtctgaatgaatctttagaatcccggatgcagcaatatagagagcggggttataaggtacatttaatgcttgggtgcgcctggggaaattataaagaatatctgtgcggcaggtgggacggaaaggaacactgggatgaatgtcagacagaccggaacggaaacccgatcctgcacggggtcgatacgccatatatggtgccgacacggtcctttatccaatatctgacggaacacttatgcgctctcatagataaagggatcacagaaatttatatggaagaacccgaattctgggaagcgggaggatattcggaggcatttaaaaaagaatatctggcatattatggcgtggattgggagccgccccatacaaatatcaatgcgaagtaccgcagttccagattaaaagcatatttatatggaaggcttgtcagacatctcagcagaaatatcaaagagtatggaagaaaaacggggaaagagatccatttttatgtggcgacgcacagtctggtaaattatgcacaatggaagatcatgagtccggaaagccgtcttttggatgttgatgaggtggatggttttatcgcacaggtatggacggggacgagcggcacaggaaacgtatatgagggccattataagagcagaacatttgagacggcgtatttagagtatggcatcatgcaggaactggttaaagggacagataaggaagtatggtttttacaggatccggtggaagataacccggaacatggctgggaagagtatgcagataaatacaaaaagaccctgacagcagctttattctggccggatgtggatcactacgaggtgtgtccgtggccaaacagggtgtttaaaggaagatatcccagaaaagtcggtcttgcggagggaatgatcccgacggaggatatggaaggtgcaaaaaatatcccggatacctacgcgacatttctggcaggtatgatacagacactgggagatatgaccaaagaggagagcgaaacagaaaaagatgcggttggtgtatttttagcagatagctgtatgtaccagcggacatacccggatcaagtggaacatcatgggcagaagatcaatctgtcggggatggaagattggatgaaccgtcttatttttcaaaaggaagaagaacgtcagcttcttttatccatggaaaaaatggaatatgcgtataaagaatgctgcgcattcccggactggtttggtctgacactgccattattaaaatatggtttaccgatacagccggtctattttgatcacatggtccgctatgaggaatatctgagaaaatatcggtatctgatcttaagttatgaatttatgaaaccggaaagtgaagaatttcatcacaaactggtggaatgggtaaaacagggaggcacacttttttatattggaaaagactttgatccatataattatttacaggaatggtggcagaaattttcctgcgacacgcctgcacaacatctttttgcagagtttggaatggataaggaaccagccaatggatgttaccggatcggagagggaaatgttctcgtatggaatgaagttcctgcgctgttaagcgtgaatgaagcgatcgcagataaataccgcaactggatccgggaaggacttaagatgggcggatatcactggaatatgtgcaattatctgtcggtaagaagggatccgtatattgtgatagcgtccatgcaggaatcggatacgggatcggtttatacaaaagagggtctgtttgtggatctgtatgaagataaatatccggtcgtggagcgggttttggtagaacccgggcaggaaaagctgctgtttgatcttgaaaagataaaagaagatgtaaggattatcgcaacggcagcgcgtattgaaaatatggcatgtgaaaacggacagcttagtattgaggcgaaggcaattgatcacattcaggtgaatatgaggatccgcctgccagggaaaccggaagatttatgtgcacatacagaaagcgggaaaaacatggaactgcagtctgtatgggatgagaaaagcagaacggttttgttatcctacagaagcaacaacgaaaaagtacatattacagggaaattaaagtatgaatcatgatgctaatgcagctgccagataatttaatgggctgcatcatggaacttatataaagattggaaacgatcttaatatagaaagaaaacaagacaaggaggaaaatatggatttcttagacaaaagagtcggtgtaatttgcaacgaacttaagaaattaaaagtaaaacaggtatttccactgacacagtgggagtacaaggaaggaaactttattcacccggaggatgcattaaaagacgaggcagcctgggaaaactttgactgcaagaccatgcactggtatgg

SEQ ID NO: 5192 - DNA, 13044 bp, Unknown
  gut microbiota DNA sequence
agaataatgctgttaatataatttacagatagctgagtaatgtcacctgatttactttggaagctgcctgcagtgatgactggtaagcagtatatgccgctgtatactctagaatgatatcagagagctcacggtcttcattcttggactttaactcttccatcgtttcctgctcatttgacatacggtttttcgtcagcgcaaggctctgtcctttgcttccgacgtctgtcaatgcaagattgactttattcaggtaagtatcgcagttcccaatgtagctgttatagagtttctgcatattatcatttgcataatcacgctctttttcggctgctgcgatccactcttctaattttgcctgacagtcatcggaagaatattcctgcattttcttcatggcatttaaatctgtcactttctgttctgcgtcaagcgaacgctgtacagcatcgatcagctcatccacatccctgctgagtccatgatcaaatacatttgatgcctctgtattgacagtaagtgtctggtttgcagccactacataatcgatatcctgatagatctgattgccatctttatcatatttctcatactttaacttattgttcgtatctgtaatattcgtgcagttgtaataatattccggacgaagttcaccatttgtaaatccggtctttgtataggaaatatccaaagatgctttattagtggaaagtgtatctgctgctgttttgctgaataccatttctccggtattacggatcagcactgcctctccatctgcaatgtcatatgattttggtgttttcgtagatgcttctaaccatttatcataagaatcatatacggtaacattcatatttcccgtcttattgacaggcgttgtccctgttgtatctgtataattgtaactgatcgttaccgtgctgccatttgcagaggtttttgtggtagttcctgctgcatctgtcacatccaggctgtcaatgctgtcatagccaagacggattctattataagcagcctgggttggagaagcgatctttgtgccatctaacacatctgccttatttcccggaactgtaacatcatttccataataccggtgttcctgcagatcagcatacgacatcttctggtcgatctcgtatgaagtcttttgttcgtcttccgtgaatgtcagctttttatttgtgcggtatccggtaaatactgttctgccggcatagtctgcatttccctctgcatatactttgtcacgaagtttttccagctgtgtcaggattgttttccggttatctgtcgtcagggaatcctgggcaccgtattcacactgggtacggatcgtcttgatcacttcctgcatactggtgatcgcagtctctgttacatctaaccatgactctgcatccggaatgttcttctcgtagtactggtcgatctcacttaaggtactgcgcagacggagtgcacggatcgctgttaccgggtcatcagaaggacgctgtatttttttctggctggtcatctgattgttcagtgtgtccacatttcctttatttccattgatattaatggatgtattatgcaatatgatattatttgtaatacgcattgccatttcctcctgttataaatccgtttatactccggtttcctcgatcagtttgtcatatacttctgccataactgagatcatcttggatgataaattgtaggcattctggaacttgatcagatcaagtgcttcctcatcctcatccacaccggaaacagacattctctgtgtctcaagcgccgcctgtatatttgtataattgttgctgaagatcgtagactgctgtgtatcaatggagatatcagaaatcatacatttcaggaatcctgatgcatttcctgcacggaataaaaccgtatcactctttaattttgccagatcttcaaccagtttatacttatctacaccatcttctgtatcggtcttatactgtgcagcaagtttagatgaatcttttacacaaatggaagaaacgcagatattggatgctgtcagtttgtaatatgagctggcaccacagtctgttgtgtttccattattcttatcgctctttcctaatgcatattcctcgccggttacctgatctgccccggtaaagaatgaataataatcggttgcatttccgtctaaatcctgtccttttaacataatatcattaaacaaagaacagaaagaacgtaaaaactggttcatctgtgacatgtaatacggaacacccatggtatcaacagagtttccgatggatgcctgcattccatctaccttattggactgctgctggcttaatgcatcctcaagttcgaaagtataggatgtgatcttgccattggcgtctgtctcaaaagtaaagtttgtataattgtaatcttttccgtaaatggtaagtgtaccgctctcaggcaccgtcattgcctcaatgtctgtgatggaaggactgactactttcacatgtttgctgtcgatcactcttgcctcaccggtaaagttctctccgttgttgccatcacggatatcaaacaatgcctttaaggtacctgacatggaacttgcgccagctttgaagctgttgccggttttctcccatttaacatcatataaaccgtccatatcggactggtttactttattttcccttgcaacacattttaatgtttcataatcgtaggtatctaccagtacctgaccaccgatcttaactgtaaagtaattagctcctgtcggcagttccggatcgtttgagttctgtaccggaagttcctctgcctctgtcggaacaatcttggatagctcatcgatcagtaaggctctctggtcacgcagttcgttcgcataaccaccctgaatttcaatgacgttgatctgatgatttaaacttgcaatcttttctgcgatggaattgatattctgaaccgtggatttgatctcctcgttggcattattctgaatatctcccagaccggatgcaacgctgttaaagaatgttgcaaagttctgggcacttccgataaactgctgacgtgtattcacatctccggcattgttctttaaggtatctaagtcattaaacatcgtgtttaagattgttgaaaaacctttggaagaatcatcatcaataaaataattttcaatctgcttcaggtaattgagcttcgtctcatataaaccgacagatgactggttgtaccagtatttattgtcataatactggttacggagctgtttgacagactcggtcgtaacaccggttcccatactgccgtattttgcataggcacggatggattcggaagcaacacggtttgcctgctgtttgctgtatccttttgtctgtacattcgatatattatttgcactcgtatttaaggcaacctgatatgcacttaatcctgaagatgcaatcgttaatccaaaaaatgttgatggcatgttaacctcctatgctgctatccaagctgtgtgatcagatgctcgatcatctcattaataacattaataaaacggctggatgcattgtatgcgttctggtatttgatcatataagtcaattcttcatccgaagaaactccgattacctgctgtctctggttatcaactgactgtaccgtctgggacaggtttgttgcagtagaattgtatacatttccgtaggtagcaacctctccgatcatagctgcataatagtccttaaagctgtatgcctttgtgtcattcggattgactgtaaggctttctttatcccacactgctgcaagtgtcgccatcagtgactggtctacatctccattctgccgtaaatgtggaagtagtgtttcatctgtgatcaatgcgctgttcacacttgtacttcccatcgtgtactgctttgttgtatcagccggatcttcttcattgtataaataataggtctttgtctcaccagaagccggatctgtataggaaacctccgtataacgttctgttccaagtcttgtaaataactcctgtggcggaagtttgccatctgatcccactgcgcatttatctgcatctaagatcttcgtatttgctgtcacggtataggtattgccgtctgcatcggtcatggtaacagatccgtttcctgtcaaacctgtgatgtaattcgatgcttccgtattcgggcataagatatcgttgatcgccgttgcaattccatggaacaactgatccatctgtgcttctgcacggagcataacagacatgcctgtcgtatcatcataagtcttgccgtccactccaagaatatccttgtaattggcaactttatctcctctcgcaagcacaagagctttgatctctcccatatcgtttttattttccgtggaaatatcacggttaaaattaaacagataggtatactcacccttgtccggatctgacagatgggaccagtatggtgtcacaaatcctgtcgctttgtccgtctgtttttctactttatagtagccgttctcattgacaaactcgttgccttccacgctgacgcgcacgacaccgtttgcctcttctttataagaaatatcaacaagacttgccaattcatctaatgccagatctcttgcatcacgcagtgtcattgcagtttcaatatttcctgcctcgatcttctggatctgcagatttagttcactgatcgtctttccaagttcattgacctgatcaatgtcatcggaaatctgtgaattgatattatactgataactcttcagtccagaataaacagcacttgatctgctggtaaaaagctgtgccttctgaataacaagattctgatatacgctatcctccgggtatttatatagctcctgaaatgagccccagaaatcggttaatgcatcctgaaaagcctgtccctctaattcctgataatagttctgcacctctgtcagtgcctcactggtcgatgcataaaaagactgacggcttgattccgtacgatataaccgatctaagaatacatctcttgaatggacaacatctccgatcgttacaccaagaccggattgctgattgctgattgctgctgttgtattaaatgtgacatagtcacggtctgcaaacaaaacgctctgacgcacatatcctgttgtgtctaagttcgccaggttgtttgatgttacgttaagtgcattctgactgctctgtaaaccggctacgccgataaacatacttccaaaaccatttgccatggtagttcctccctgcttttactattgcttcgcgtcgaatccactgctgcctaagatatcgcctgtattataggcattcttatcatagttggcagtctcaggtgcctgtcgcgtacttctcagcaaggtaaggtcaaattccaccatctccaatgcctgttttaaaagtgcttcattctgtctgtttagctgctgcatcttagcaccggcctcaagcagcctgtcacgctgtctggtaagtgcttcctgttcttttggctgcttgttaagatatccgatcatctttgtgatcgtcatctcttccgggctctgacctaagacagtcgccatatccgtcaggacacggtttcttttattggaaagattaagaagcacgctcgcagcatcctgctctctcgtcgtaacatccgtaagatgttcgatattgccctgcaccactgcgtctgttttttcagtcgcaagtgtgatcagttcctgatactgcttctcctctttacccagcacatccaaaagctcttccattaaactagccacagattcatcctcacttttactttactaaagcattgtacttttctaataacttattcgcgaaatcattcatatccacgttataattaccagagtccaacctttccttaagctgtgcgactctatcttccctgatatccgaagcatctgccactgcctgctttgcgatctggtaatcacgtcccatagaagagatctgcacttcatcgcgtccggtgctcatctgctttgtgttctgcactttctgcgttttctctctattgtaaagttgtgccacctgattataagcttctactcgcataatggcatctcctttcttccttgaaattcgctttctagtttttatatcggacgaatcatttttttcattagcgcaaatatgaaaaaagaaaatgacaggtcaccacttttcgcagtatcctgtcatttttctactggtattcacggatcaggcagtattgtttcagtgggaagttcttctccacaattccatacacctgaaatccaaagtttttataaaaatctacatttttttcattgtgtgtttccaacgatatcatcatgtggtgttcctgcgcatatgcgatcgtttcgtctaacagtttcgcagcgatcccatggtgctgcatttccggatcgactgcaagataaataatatgaagtctctgtgtctggtgcagctgatcggtccagcttgagttcaggtaatccccacccttgataaaattgtggaacgtcgcaagtgtcggatcttccttgatcaggaaagcgtccgtatggatcgtcgcccatgactccgtcagaaaaaagtggaacatattaatgtgttccgcctcatccgacacgacaagaatgctgtttaattcttcgctgtccgcaaaaatctcacatgtctcataaaattcatccatatcacattgaaataattccggcatcagccgttttcttatttcggcatccgggatcagcgtttcatagagtggatcatgcgcaaaacagcggtataaaagctgctctaattttggcaggtcctcgcgctgtacccggtataatttgtccgatttcatatttttcttatcccctttttattgtatcagaacatttcctttaccgtctgactgatttcttttaaggtctcgcagagacgtctggtctgttttttatagcattcctttaagtaatgcagttcttcccggtaatctgtgtctgcttcttttctctttttcagcaggcatttcaccacatggtagagatcctcatgctctaacaaccggccataaccccattttaaacgctccttcggctggttgaacacataatccgtaaaatggcggtagacatattcatcaaacataaacgcatacgcattgttatccacctgataaattttttccagtgcgttatccacatcagactgttccagagcgtttatagtgtcctgcaataagccaatatttttccacaatatctcatgtgggaaaaatacctctccataccagtcaatgcggacaaaatgatcctgctcctgtttgaattttacaagcagttgtttttctctttccctgttttccgcaaagagctgctccgcctcttgcatgttaccttctgcaagaagtgcgtggtagcgggtattgatagcggcagtctcttcgtaagactgttttgctttttcctgtgtctcttctgttacctgaattaatttttttgtgattgcagcgatctgttcctgtgtttcttccactttcgctgcgatttcactgcctccggcaagtatgcgctctaacaccggtgtaaaatcaagcggcacaactgccgtttcatccagtgctaagatcagcagtgcgaacagctcatggtgcagccggtaaaccgcctcatcataaaaatcatcattatcaaactgggaatggtaatgtgtttccatgaaacttccgccggtaaaatcattgaccatggaagggattcctgcgattgccatcgaaaaatcatctgaccaggtttcgatcggtgccgtcacgcttgtcatctcaggataagcctttgtcagttccggaagtccgtctaaatattcttttatataatgtacatattcataacagcagcggattcttgcacgcgtgccgtgtgccagcgccggcagctcaaaattcagatctgcgatcacttttccgacccattccggatgtgcggtaaaaatctgctcgtaagctccggtcgaccagtcaaagttggaatcaacaacgccccattcctctgccgccatcgcacagaacacgatcgtgttgttcggcttgaatccgctttcaatcagcgtttttgcaatgccaaacatcatggcgactgccgtattatcatcttgaaatccactgaaataggagtcatagtgtgcagataacaataccatgcgctccgggtgttttcccggaatacagcctgaaatgttataagtcgcgcagtcacgttttacccggctgtcggccttcaaccatacggttgcttctttctctccatccagcagttcccgcaataatgcagcatcctcccttgagatggaaaatgccggtgcatcctccggtccggcgatatcctgtgcgttgagtgccttcgcatcgacttctccataaccgccacactgcacagcgatcactgccgccgcaccttttaaatgtgcctgataaaccggataattgatccaccactcatctctctggttgatatccactaacaccagttttccggttacatctttcccttcataatccgcttctgttccctttccaagatacatcagggaaaatgcctgctcaccgtccgttacaaaatctgtctgatatgccccgagcaatgcggtatgcctttttccctctttcgtttcaaacgtaagctccgcattttcaaactcccagccatccacggtaaccgcatttttacatacatccgacagtccaagtttttgcatctcatcctttaacatttcccctgtcaggaattctgccttcgaacccgcaggacggtaaccgagtttctcgtttgagcgaaactgctccatccgttttgcaagctggtacgagtaatccgtatcaatattttttatgaccgcttcctgcattgtcatgtgtgtcacaccttcttttttgcttctatttttgctgttttttgtgttatctatttctttttgtgttcaaattatttcctgtttttgattataacacacttttttgttatgaacagtcttgtggggggattttgagccgatataattatgtggatgggttcgattcggatggacatggctgtcggtattattatcggcggtgcttttacaagtattgtgtcgtcactggtcgaggatattatcaacccgtttcttggaattttcggtggcatgaattttgacaagctgcactggaatattgttggggatgtcacattgaattacgaaaagtttctgactgccgtgatgaatttcctgatcatggcttttgttgtatttatactggtgaaagcgttaaataccgctgcccgcattgcacctctatcttagatgcaaaggcagtggaagcatttgagaaaaatttgtaattttcatttgccacagcagatgaaaattcaggcaagtaattatacgaaatgtgaatgatacattacactagttcaggctgtctgtctttgtgtcatgaacgatacaaagcaggcatgtctgtccatccattttccgatcagtccgatcacttttcccatagtaaatgcggctaaaatggttccgatcccaaggccgtcaagatgtcctaaaaatgcaaaggtcagtccggctgtcacggcaaggcaggtaacatcaaatccaactttgatcttagaataggtaacggatgtgatatccgacaattctctcgggaataaatccgtcggtatgatcggcagtttgcatcggttcgacaaagcaattccaatacagagcaaaatataactgatcagaaaatagattacacgatatcccggcgtcagcggcaaaacattgatccagctctcatgcacatccaataattcgctgaatgcaaatcccactacaaaactgaacagatactgcggcacaaattttttccgcaggatcatgagacttagcaccagaagtccttgaaatatataagtccaggttccaagcgatacgcgtgtgaaaacttcggaaaatgcatacggcacgcttgatattgccgagatgcctgcaccggaatgcagcatcagtacaacaccaagactattgatggcaactgcgaccatgagtgcaagttccccgcggaccgtgcggcgggatttttctttctgtatttctgtttctttcattttaaatatttcctcccggggaagtttttacagaagtcctgcttctgcatttatggtcatccccaaatttcagaaacactttacacctttctaatccatttaacaaatcaatagtttttatagtttgatagacagtatctattaatcgtgataaaatgagcaaaacaggaaggaaaatcctctcctcggcattgggcaaattttaccatgtaaaattggattttgcttcgcaaaacaaggaggattgccatgaacttattccagcttcgttattttgtaactttagcaaaaatgcagcactacacaaaggctgcacatgaactttgtatcacacagccgagtttaagccatgcgatctcgcagttggaggcagaacttggcgtggcactttttgaaaaaagcggacgcaatactacactcacaagttttggggaagagtttttaatctgcgcaaaccgcacgcttgccacattggattccggagtttcatccctgcagcggagcgcacgcggtgacggattgatccggcttggcatgctgcgttccctcggtgtcaatttcattccgcagcttgccgcgcgttatctggcatcccatcctgagcatgatgtgcgttttacatttcataccggctcgaccggcgatcttgtcaacggtctctcggcaagggattatgatctgattttctgttccatgccgccggagacagaatcgttagacactgtgccgatcacccacgaggatctggtacttatcgttccagaccatcacccactggcagcaaaacagtccgttgcattgacggaaacgctcatctatccacagatttatttttcccacggttccggtatgcgtgccgttgtggaccatctgttttcacagatcaatgcagtaccgcagattgcctatgagacagaggaagccgaggtgattgcgggactcactgcacagggttttggcattgccgtcgttccttatatggatcttttattaaagctggatgtgaagattctgcagatcagtgcgcctgtatgggagcgtaatctgtatatgattcatgaccggcaggcgtttatgccgcctgccgtaagaaatttttgtgaatttgttttaaaagaatgtaagtatcctatgataccagattaattctgccacaggatctgttgttttgtgagcattggataatgcaccggaacacttccgtcaagatcttctctgtgcatgtccaccgccgtgatctggctgttggaatatgtggtgtagtaataaattccacggcttgcattacagcaggaggtgtagatcgtgatctcatattttccatcggatacctcgcagcagcctctctgctggtcgacagatcctaagatatggaaaaactgtgccacactctcctcctcggaatcgtcagaaactgcgttcatttttgtaaacgcgactctcgcaaaacgggaagctgatgaaagatcacccggcagtcctaatgctcccatgccacgactgtacatattcagatccagtttatccgcaaaatgattttccggctgttttggtgacagtcccatgtaattattcagcataaacatctgctgctcaaatggcggattgtttgtcaggacaccaaccggattttcatggatatgcagtccgtctttcatggattctactgtaatcgatccactcttatctgagatgatccagtgtagcatgccggacggcagattttcactgaacggcgtatccacaatatttaaatctgcaatcagctcccgcacctcatctaacgttgcgcactgcgcaagcacccatggaataaattcaaaggatgccacattttttttaccgctttcttccttatgataatatgcattgccgacaaaattaagtcccgccatgccgacgcctttttcgttcaccgcatcataataaagcggataatctcctgccatgtgcgccatgccaatgatcgcataatgtttttccagattttccgtgtgacggaaatgaaatggataattccgcggtgtcaccgcgatttcctcgccataagaaaattcataatctaatgttcttccaaaataaaagtctttcgtcaggtaagttgctgctgtacacataaaattctccattcttatattgttttcaagccggggctttcgtacgaaaaatctagccaatctcgtccacgtttgccccacgcagtttaattccgtctgtctgttttaaatcctgctggtatggattcgactcattataatatctgatctgtgtgtccgtcacaccaccggaaatataagaacggccacattccgggcagaccgatgtctggactctgacggatgcagataccacttcgccgttttgcgtggcagctttgtgatacgcattggaaacatgctgcccctcatgtgcccggacagcagaagatgccgcttccggtgaaatatgcgcagcatttttaaaggaaacattcgcttcgttagagccatcaacatatttgcggtttttacaggtctggcactccgtggtcttagatttatcaaccgcacctttttttcccagctcatctttattattaacattattccgctgatttaaattattatcataggaatctgtgatattccatttgtatccatccacgccaccgatcataacgctcctccatccccataggtcttttatacccaagattcatcatacggcaaatctgcaattcaatatgccaatttttacagttgagataatatgattagggtgtcaaaaggtggttcataacttagcgattgtcaaattgcacaaagccgagactgtttttgtgactttgggagaaaattagaaaatcttagtatgcctgtctatttacagtaatgttctgccacggacggcagaacaaggcttcac

SEQ ID NO: 5193 - DNA, 587 bp, Unknown
  gut microbiota DNA sequence
aacgtatatcagccacttatggagcacttgaccaatttgacatcaaaaatgcctgattgaggcggaaaaagcgtacaagcgtaaaagacagaagaaaaaactggtatgttgtgggttaaaaaatgaatttcactttgaaaaccatgatttttgtaagactaaatgtcacagaagggcgaaatttaaccgctgctgttcagatgcaagtgaaaaaagtattaaaaaatggttgacagaataaaatacgagtggtattatagtcaagctgaccgctggataagacatgatttgacagaggacaacatgattttggaaagatttccaaaataaaacaaaaaaaatcttgacaaacagaacaacacatgataagatatcaaagttgtcgcgtttaagataacagatcggacaaaaccgattgaaagaaaacttttcaaaaaatgaaaaaagttcttgacaaaacagacttgataagatataataaacgagctgttgccgagaacgacaacaaaacaaagaaccttgataactgaacagtgaaataaccttgaaagattcaatgaatttcagggtgttgtgaataacaacac

SEQ ID NO: 5194 - DNA, 66702 bp, Unknown
  gut microbiota DNA sequence
attgctcgttcacctttattatacgcccgatcttaccgtctttcaatccgtcttctgattctcctccataaaacagccgacaaaataactgctgcataatccgtcaatgcctgtccgtaaatgacaccgtttaaccccatacacgcatttaacaggtacaaaagcggtatcagaagcagtccctgacgcataacggaaagtatcgtcgccggaaatgaatttcctactgactgcatacagttcatattgacaaataacagccctatgaccggcccggaaagcatgtaggcgatcagcattttcacgccataatacacaacttccccgtcactgatgaacagccttatgatcggctcccgtaaaaccaaaaacagcgccgtagctaaaatgccgacaatgacacagcatttttttgtataccgttccacggaaacaaaccgcttgtgatctccagaaccatagttatatcccagaagcggctgcactccgtttgccagtcccatctgtaaaaatgtgataaacatgtttgccttaaacacgatgccgatcgccgccacctgcagcggatctccggtctgtccgacaaaaaagtatctgccatgttgtatacaactgttaccagactgctgatcacactcgggattgccatctttgcaaccgccttcgggacgggaaggctgctcatcagttcattttcgttcattttttctcctttctttcggtggtttttcatgaaaaaacgctttcacacgaattaccatttctacaccgatatatacatactttaacgggggcagtttagtcagaatccagattttccagcattttctgtgccactctcaaaaagatttctttttcctcttttgaaattccccgcaggagcaacgcttcggactcttcaatctctgcgcgaagcgcatctttgatgcctgccgctttgtcctgaaatacgattcttttatagcgggcgtcattttcctccggcacgcggtcaagtattatttgtttctaaaaattctatttcgcgagacctttttcctgattttggaagcttaataacatgcatcctgctatcctcaatatataatgggcgaaagttcctttgtccaagtctctttcgcccatttcttctttctttttaacattttcacagccatttcgggcgaaaacatcttctgttctcctgttttcgccctgattttttcattttcgtgggctattggcttcatccttataacgctttcgcccattctcttctaaattttcattaaactgcgataaaaatgggggaatctctttcattttccattcatttcgcccattctcttctaaatctccattagacttcggtaaaaatggatgaatttctttcattttccgttcacttcgccaattttttctttcttatacaccctgcacgatttcatttaagaaatacgcatgcacccttgcatcttcactcacttccgggtgaaaactgagcgcaagctggtttttgtagcggactgctaccgtattgccatccactatcgccaatgtctccacctgcggatttaaaatttcatcaatatatggtgcacggataaaattcatccggtaagtcccaatgtgtgcaatctctgcgtccgtgacaaaacttccgagctgtctgccatatgcattgcgcttcacgcttaccggcagggtttttaaatacgctctgtcatcgttggaaacacgctctgctaaaaggatcagccctgcacaggtcgcaagcaccggtgtacccgcttcgatcagttcttttaactggtcagacatgccaaggtctctaagcagttttccctgtaccgtgctttcacctccgggaagcacgatcccctgcagtctgccattctgcacagcctcttccaaatcctttttctgacggatcaggaatgtatctgcaccaagcccgtcaagcatcgcctgatgctccgcaaatgcgccctgcaccgcaaggattccgattgatactttttctgacatgatattctccattcttgcgctgttttttgcgcatctcaagtttgtgcgtaagcacaaatcctgcgtgtgaaaaatcttatttttcacactaatctccatttctgagcaatttatttcccacgctctgccataagcagctgtatctcgtcctcgttgatgccgaccatcgcttctcctaaatcttcagataactctgcaatcagttttgcatcattgtaattggtcactgcctgtacgattgctgctgcacgttttgccggattgccggatttgaagataccggaacctacaaatacgccctcagcgccaagctgcatcatcagtgccgcatctgccggagttgccacaccgcctgctgcaaagtttacaaccggaagttttttgtggtcatgcacatattttacaagatcatatggaacctgaagctgttttgctgcctcgaaaagttcatcttcacgttttgccgcaactgccgcgatctcggagttgatcagtctcatatgatgtaccgcctgaaccacatcaccggttcccggttcccctttggtacggatcatcgctgcaccctcagcgattcttctgagtgcctctcctaaattttttgctccgcagacaaacggcacctgaaattttgtcttgtcaatgtggtaaatatcatctgccggagaaagcacttcactctcgtcgatgtagtcgatctctaatgcctgtaaaatctgtgcctccgcaaaatgaccgattcggcattttgccataaccggaatggaaactgcaccctggatctccctgatcagcttcggatcactcattcttgccacgccgcccgctgctctgatatccgccggaatccgctctaatgccataaccgcacatgctcctgccgcctctgcgatctttgcctgcccggcatttgtgacatccatgatgacaccaccctttaacatctgtgccagttcacggtttaattcatactgctcttttgtattatttatattactcataactaactttctcctttttcagacaaccagtttgattttctgcgcagtttttcaaacagttactctgtatcaatttctttccggatcctgatgttatgaagtataagaaaaaactggatgcatgaaaacatccagttttttctttttcagccatgccagtttgtaattaacatgatctgagcattcattttttatttcaatccatgataccatatcagcaccaataaatcttctatgcccggactgcccagcgcatcttcgtagaccgcgctcttccattctgtgcacattcctgtgcactcggtcttacaacatcttttgaataatctgcataaattcctgcacgacagccttcttttaatgctttcttgaccagcttatcctccccggaatgaaacgtgaggattgccacacgtccacctggttttaaggcgtctggcagtttttccatgaattcatataagacctcaaactcacggttcacatcgatgcggagtgcctgaaatgtacgctgacaggtctttttgatcgtgtcctttttttctttttccggcagaaaatcaagtgttttttcaatcacttcgcgcaattttgtcgtcgtgtcgatccggctgccctttcgtatctcgtcggtgatcgccttcgcaagctcctcacagtaaggttcatcggaattttcatagagcattccggcaagttcctcccttgtgatggtatcaagacgttctgccgcgctgattcctgcttcctgatttaagcgcaggtcaagtggaccatccaccttaaatgaaaatccacgctttggattgtcgatctgcatggaagatacacccagatccgctaaaatgaaatcaaaaccgccggcttcttttgcgatctcatcgatcgtacagaaattctgcagccggatcgtcaggatatcctctccgtacccgagttcttccagtctctttttcgtcttggcggactcctccgggtcaacatcggttgcatagatatgcccctgtccgttcagacaggcaagcattgcttttgtatgccctccatatcctaacgtagcatcaaaaccggtctcgcccggctggatatttaaggtatcaagaatttcctgcaccataatggaaatatgcattcctgccggcgtgtttccctttttgatgacatgttcgatcgtatcctgatatttttccggctgaagttctttatacttttcctcgaacttcttcgggtattttcctttataacgtacacgccttttgtgcggtgtctgctgttcctgttccatatgtctgtcctttctgtttccaaatcatggtttcaaaaaaatatttcttatgatgatctcaaaaccacccttttccatcaacaactaatgtctttcattataattgctggattggaacaattcaatgcctgattgctttgcgcattataaaaaatcccacaacacaaaaaatgccctcttctgagagacatttacccgcctgcttagaaaagagcatttttacttcatctgaaattgtattcactgacaaactgcatgtaatctcaaattacatgtaatctcaaattacatgtaatcccaaattatatgtaatcctaaattacatgtaatcctaaattacatagaatcccaagtttacaccatcatccatatctactagatattcagcagatcactgaatactttcagtgcaccgtctgtctcatgtgcaagaacacgttttgcaaggactttaccaagctgaacaccttcctggtcgaagctgtttacattccataagaatccctggaacataatcttattctcgaagtgtgctaataacgcaccaagagaaccaggatttacctgatcaccgataatgatgctggatggacggccgccctcaaagttcttgttgcggttctcatcggatttaccacatgcaaatgcaacgatctgtgctgcaacgtttgcacacagtttctgctggcttgtgctgtcctggatcacaacatcggttccgatctggttattcttaaatccaacgaactgaagtggaacaatgtcggttccctgatgtaataactggtagaaagagtgctgtccatttgttcctggctcaccaaagatcaccgggcctgtcggatagctgaccggctcaccgaagcggtttacagatttaccgtttgactccatgtcaagctgctgtaaatgcgcagggaaacggtttaatgcctgggaatatggcaatactgcagtgcaaggataacctaaaacgtttcgctcatatacaccgatcagtgcatcaagcatctcagggttctttaatacatcttcatttgcggaaagtttatcttcggctgctgcaccctctaagaaccgtgcaaatacttccggtccgaatgccagggataaaacggctccgccgactgcggaagtggaagagaaacgtcctccgatatagtcatccatgaagaaagctgccagatagtcatcgctctttgcaagcggggatgtctcactggtaactgcgatcatatgtttcgaagcatctaatcctgctttctttaatgcgtcttttacgaaagattcatttgttaatgtctcaagtgtggtacctgatttggaaaccagtacgaaaatagagtgtgccacatcaatggaatttaaaactgctgctgcatcatccgggtcaacgttgctgatgaattttgcttccatcttgaatgtgttgtttttctttgcccagttttctaatgcaagatacatagcacgaggaccaagatcactgccgccgataccgatctgaacaactgttgtaaacttctcacctgctgcgtttgtgatctcgcctgcatgtactttgtttgcaaaatcagcaatgcggttctgctgctctacataaaaagcacgtttgtccacgccgtcagcgtttactgcatcaccaagctgtccacgtgtcatatgatgaagtaccagacgtttttcaccggtatttacaacttcaccattgtagagagccttaaatttctctgcaagctgtgcctcttttgcaagttttacgagtgcatcaagcacatcatcatcaacagcttttgctgcataattgtaagtaaatccctcagccataggaatgctgtaattttttacacgctctgcaccgttctcgcctgacattacttctgcaaggtttacgcgggaagcctttgaaagttccttataggaatcaagggtgtctaagttgttccaggtaatcataatgtcctccttgtttttcagagagaaatacccgctccataagaatcgcgcattttcctccataaatatatttttaggtacttaaaatttttttagcttaagtgattatactattaaatatctgcaagttcaagcctctgccttaagatcgcgaaaaattactaaaaaaattaaaaaattgtgcacttacgaccatgtctgtaattttcagacggacattattttccctttttgaacgatgttttttatctgcagatctttatccagcaatagcaggtttccataatttccaactgcaatcttaccgtaatctttctccacaccgatcgattccgcaggattttcagttgctgccaggactgcatcctcgagcgggattcccatattcagtacacagtttttcatgcagtcaaacaggtttgtgacactgcctgcgataacacccggatcttttgtcaggacggcttttctgccttttacggtcacgccctgcccgccaagctggtagtccccgtccaaaagtcccgtagcttccatactgtctgagatcagaatgactttatctgccccgaaaatgcggaatgtcgttctcaccatcgccggatggatatgaataccgtctgcgatcagttccacctcggctcctgcctcaagtgccgctatgatgggtcccggctccctgtgattgatccccggcatggcattatagaggtgtgtcatatggcccacgcctttttccaatgcctcgcacgccgtatcgtaatcactgcaggtatgcgcgatagagatttttaccttgtcatggcactgttcgataaattccatcgcacctttttcttccggtgcgatatctaccagtttgatcagcccgccgcttctctcctgcagacgcagaaacatttctttatctgccggcataatatattccgggttctgtgccccggctttttttagattgataaacggtccttccatattgatgccgactaaatctgctccggtatcttctttgtaatctgccgccttgtccatgacatgtcctaagatttcttcattataggacattgtcgccgggcagatggcaagaacaccattttttgcctcatattctgctatttttaacagttcttctttcgatgcctgacagaaatcatagcctaccgccccatgaaaatgaatatccacaagtcccggtatcgcatacatgccttccccgtcgatcacatcctcatctgtggcagtaatctgaccgttctctgcgatctctgcgatccgttcatcttcgatcctgacatctttcttttcaaacttatgatcttctgtataaaccaatgcattttttatgatcattttggattttcccccttttaaatctccgaaagtgcatcctcatctgcgatcagtgtgaaatccggatgcatctgcagaatggatgccgggacttccggtgtgaccggtccggtaaatgcttttttgatgatatccgccttgttttttccatttgcgatcatgatgactttctttgcctgtacgattggcaggatacccatggtatatgcctgacgcggaacttcatccttactctcaaaaaatctcttgtttgcctcgatcgtgctctccgtcagttccacacagtgtgtatttttttcaaaatgatccgccggttcgttaaaaccgatgtgtccgtccagaccaattccaagaagctgcatatcaataccaccggctgtttctatgatcttgtcatattccctgcagacttcctcactgttaagattttctccgtttggaatgaaaatgtggtcttcccttacatttacatgtttaaacagattttcctgcataaaactccagtagctctgttcgtggtttcttttgattcctctgtattcatccagattgatcgttgtaactccggaaaaatcaacctcaccgttgttatatgcttccacgatctttttatatgcccccacaggtgaaccacctgtagcaagtcctaaaaccgcatccggttttaaatttacctgtcctaaaatcaaatttgctgtctttacagaaacctcatcatagttttttactttaataattctcatgttgttttcctccctctccctactggtatgaatcatatgacatcataaaacgctcttttaccggctttgtatcaaccccacataacaggcagcacatgatacatgcgccatataccggcggatagtccggaacgtctaattcaatatccggatgcagcatctcttttaacatttcccggaatgccggtttctgttttaaaattccgccggatgcaaccacatattttccgatatcataatgatccacggcaaaattgataagttccgctaaacatgctgcattgttctttaaaatctgctctgcgattttatccccattttcatatgccagaaatacgcacggcgtaaacgaagcaatataggactggtttttactgtagatgtcctggatgctctcccataccgtattccctaatttttcctcaacaagatccgtcagtatcgtatgttctccgatcccgtcccttgcatcctgcgctgcacagatcgcatcccgtccgatgtggtagccgctgccgcctttatcaagcagatatccccgcccgccaaaatgctttaaatttccattctggtttgcgtaaatgatcattccggttccgctgattgcagccacacaccggtcaagattttttccacaggcaatgacgttatagatgtcattttcgcactggatttttactttcggatatttttcttttaacatctttttgatctttgatgtattgtttccggaatctaatcctgcagcacccacaaagattccgctgatcttccccttgatcttcatgagcgtatcaatgccaagctgcaggatgttcattgcctcctccattcctaccgtattcggattgcagccgtcaaggacgatccgttttaaaattcttccgctttccgaaaataaaacaaactctgttttcgttcccccgccatcgattccgatcatcatcttttcactgtcactgttttcaccgatcagcgtatcgatggaaacatctaaaatctctgagatcacacaaagattttcgatactcggacaggactgtccacactcccatttggataccgcctgtgggctgattcctaatttttccgcaaattcgtattgattcagtcctcttttattccggtatgttttgatgttttccgccattgtcatgatatcaaacacttcgcatcccccatctcgtttttctaatttcattataaaactaatggttgatttttcaagcatgtgccggttgttatttctttttacacatcaactatcagttgatgtgtaaaaaaacagagctgacatcgtacatgaatacaaaaaatccgggcagcaacacccggatttttttatggtctggatacttagtccatataggcacccttcatcgcactggtcgcatgctgtgcatacaattttaacagaccactcttatatttgctggtaaaacctttccagttctttttacgttcctctaagatctgtgcaatttcttccccggtcttttcctcgcctttgacacctacgatcgcaagacggcggttctcaacatcaagttcaatgagatctccctcttccacgaatgcgatcgggccgccggctgctgcctccggagatacatgtcctacgaccggtcctctggatgcgccggaaaaacgtccgtctgtgatcagtgcaacgctggctgcaagtttcgggtcggagcagattgcctcgccggtgtagaacatctccggcataccgctgcctctcggtccctcgtagcggataaatacggcatctcccggtactacttttcccttcaggatcgcatcgatcgcttcttcctcgctgtcatacggttttgcgtttaatcttgcatggaacatttctttcgggcaggcagtgtgtttaatgactgctccctccggtgccaggttgccgcgcaggattgcgatgcttccctctgtaccgatcgcatggtcaaaatcagcgatgatatcggtacgtttgatctcttttccgatcagtgcggatttatcttttaagatcgcatcacagtgctcgtagaaatcgttcttttttaactcttctaaattctcaccgagtgtttttccggtaactgtcatcacatcaaggtggagcatgctcttgatttcttccatgactctcggcacaccgcctgcatagtagaaatactgtgccggccagtctcctgccgggcggatgtttagcagataatgtgcaccgcggtgcattctgtcaaacgtatccgcatcaatttcaaaaccaaattcgtgtgcgattgccggaatgtgcatgaccgcgttggtggaacctgagattgcagcatgtaccatgatcgcattctcaagactttccattgtgacgatatcttttgcagcaattcccatctcaactaatttcattaactgttttccggcatcataggcagccttttttaattccggcgcagttgccggcatcagtgctgttcccggaagcatcagtccaagtgcttcagccataacctgcattgtggaagcggttcccatgaaagaacatgcgccacagcttggacatgcattgtgtttgtaatagcggagctgctcttccgggatctcacctcgctcatactgcgcgctgaattttccgatctgctctaaggttaaaagctcattgatcttacagcccggatcattttccacatattccggttttacaaccgttgcttccataacaccaccggtcacaacgatcgcgctcatctcttttaaacggccgatactcataagcatcgccggcattgccttgtcacagcttgcgataaaaacaccaccatcaaacgttgtagcgtttgcctgcgcctccacaaggtttgtgatcgcatctctgtgtgctaaagaataattgattccatcgtgtccctgggacattccatcgcacatatctgttgcataataacgcgctgcttttccgccgttttcatcaacaccttttactgcttcttccacaaaaatatttaaatggcttgaacccggatggctgtttccataagtactctcaatgatgatctgtggtttggaaagctcctccgccttccatcccatacccatgcgaagcgggtccatctccggtgcaagttctcttactttctgacttcttaattccatgataacctccattcctgcgctgttttttactgtgaaaatctataatatactaaatttcatgctctgtgattgctctgtcattaccgtttcttctacacgaagaaagaaatgatcagtgcaacgataaatccggttccaccaaccaatgtctccatgatcgtccaggtttttaacgttgtcttctcgtcaagtccgatcagtgatcttaccagccagaatccggaatcgttaaagtgtgagcagactgtcgctccaccggcaactgctgcaaccacacatgcaagatacatcggtgataaggatgcgatctccggcattgctgctacaattcctgctgccatggtcattgctacggttgcagaacctacacagattcttaccagtgctgcaactaaaaatgctacaataacgattggaagatttatggatgccacagcattaccaatgatctcacctaagccggagtactgtaaaatataacgaagtacaccaccacatgctgtcacaagaaggatcagtcctgtcggctctaaagattttgtgaggatcttctctaattccggcatcgtgtatccatgtcttgttccaaggatgaacattgcggctaatgttgcgatcagaagtgctgcaaacggctgtcctaaaaagttaaataacggtgccactcctgccaatgccggaaccacgcctgcaacagatttcaatatgataagtaccagagggatcatgatgatggtaacgaccgatgcaaaactcggaagtttggattcatcaatatcttcctggtttgcaatctgatccggaaccggaacataaaatttctttccgcagatagctccccagaccggacctgcaacgatcattgcaaaaaatccacagcatacaccgactaaaataacccatccaagttccacatttaacattgtggcaactaataccgggccaggtgtcggcggaataaatgcgtgtcctacggcaagtcctgctaaaagcgggatcgcataaaacagggaagatttctttgttctttttgcaagagaaaatgcaagtggaattaaaatgataagtcctgcatcaaagaataccgggatagaaataacaaggccggtgattccaagcgcccatgcagccttctcatccccaaatttctttaccattgtaactgctaaagtctgtgctccacccgatgcttcaagtatcgcaccgaacatggaaccgagtcctaccaggagggcaattccctttagcgtgtttcctataccatcgtccaccgccgttacgatttcttcaaacggcattcctgcgatcagtccgattgcaatcgcaccgattaagatcgaaagcattgcgtgaaccttaaatttgatgatcaaaactaacaacaatgccagtccgataattgctgcgataaccagccgggttgtatctaattctgcgacgttacccatgatatacctccttattgatatttgtatgacgtctgatgttttgttgtgattattgtattttattgatcattttttgtcaatacatctgatgtctagtttgttaaaacctctcttttagacaaaaaaacaaggtgttttcctaaaaaagcaccttgttttttgtatatttttccgatattgcatcatgtcatatgacgtcttaccagtttttggagtttttgtcccttactcatttttttgctgcgcctttgcctgttttttcaaaatcatctgacgattataattgaggtgcatgatcatcgcatattttgcacccgcactgtctccatttaagattgcatccgtgatcgcacggtgggtatcaatcgtttcgtcttttaactggcggtgtgtcaggttcacgaacgtgatgaccgccgactgaatgatcggtaccagtttctcaatgactttatttttgctgcaccgcgcaatgtaagtgtgaaattccacatctttctgcagatggttctccccggcaagatacagattttccacctcatcacacagccgctttaactccgccttttcctcgtccgtcgcgttttcacttgccagcatggcgatctccggctctaacatcaggcgcacattgcagaggtctaacgccagttcatatttgtccgtaaaccctgaaagccctaacggatcatcctctaagcggttcgtcccgatcacataagtcccggaacccctgcggacctcaagcacacctttggaaaccaggctttttaccgtctcccgcactgtgctccgcccaacgccgaacagctctgccagttcaaactcatttggcagtttctcacctattttcaccggcgtatgcaaaatataatccatcagttcttcttccacatgcggtgctaataattcccggctctttttttccatattgtattattttctcctttgtcctgtgtgatacataaagacatcataccactttttgccggatgtttgaacgcaaaatttttaacgtgccttcgcaaaatagtcattcaaaatttccttgatgtagtgatagcgtcttgcataagagttttccacacggatgatctgcatatggtgcgccttacagatctcatttttctgtctgtcccgctcccgtaccacttcatcctcaaaatgctccttgccgtcgagttcgatcgcaaaaacgggcagctcgctttttcccctcttttcatagacaacaaagtcaaatcttcccatataaaacagattatcataagtgacattatcatgaaacacctgggatatggcaacctctttgtggatcgtatatttattccgggtgagccagatattttccagcgcatgtgtcaggtttttcataaatgccgcttctgtttccgtggaaaacggctggattccaagtgctctcgaactgatatgcttttccgtaattttggattccccgttcattttcacatactgcaccagctcgtacagatcatcatcctcatttccctgatgaaggcgctccaattctttcccgtccgcaagaaggatcagcttgtccttcgcccgcgacgttgcgacattgatcagttccttattatttttgagccagtcataagttccctttccagtccggtcgcttaacgccgtggaaaacagcaccacatccttttcgtctccctgaaatgcatgtaccgttccgcatacaacatgctcaaatccgttttctttgatcccgcgctcgatcagtatccgctgattcacaaacggtgtgatgacagcaatacttttatcaggattttcccccgcatagcgcatgatctcctccacctctgccggagaggtattcttcatgtcacccggcccgccatccacattgacatagacaagcggctgtctttccctgctgtcggactgcacctgaagtttggagttataatattttttgttgttaaagtctatgatttttttattacagcggtaatgatttcgcaaaagtatctcatcgctgaccgcatcacaggcaagatacgtcttataaatggaattttcacggtaatcatattcatccgcaacatggtattttctgcgcagtttccggttcgtgagttcgtccaataaaataaccggctttaactgctgcggatctcccaccagcatcagtttttcaccccggatgattggcacaagtgagaccgcaacattgcactggctcgcctcatccatgattgtcatatcaaacagcggttccggttcacccagtttatgggaagaaatgcaggtcgttatcatgattggaaataccttctgcagcttctttacattctccgatttctgcagatacttgttaaatgctgctgcctgctcattcacatcttcatcatcatctaaaattttccgtaaatcctgaaacctgttactttccagctccttgatgtattttgcggaggtataatacagataactgtaaaattcatcctcattgcggtctaatagagccattgcatcccgctcagatatctcaccgatcttctggattttttcatccagattccgcagctgacgcccctgcagatccgtatgaaaatgaaagagcgtcgccacatttttcatccgttcctgatactccatgacctgcgttaacgtttctttgcgctccgtcaggtctaagacttcctcatattcctttaacctgccggaaagctgtttcgcccggtcaattctatcaccttttcgacgatctaacgtggaagaaaatactttaatgccctgcacctctctccgcagctggttgatgtaacagatacattcttttactttttcctgatttccaaggcgcagtaccggaaatgcgacccgttttcccttataagtcagggaacttaatttttcaaatacattgtttatgggtacattgttgtaagacgcaaacagtaccgtcatattgttaaaaaatgccgtcacgatcgtgtttaagatcgtattcgtcttgccggttcccggtggtccctgaatataggcaagcggatatttcatggcattgttgactgcaagaagctggtcgagattgatgttctggtttaacagtgcgatcggatatgccttcgttcttcgcggacgttccaaaagatcgccgaaaaatgcccggattggaaaagtcacctgctctttttcgtacatgtcaagaatcgccttatactcttcatgcagatttaatgcacagtccatgccaagtccgatgacatagggcatgtcatccacaaccgcccgtgcaccgtttttttctgtaatcgcatcttttattttttcaagatttttttcaaaatcggataacagctcatattcatccgcatctaaataccttcggatattttcctgctctccccctatggtaaactgcgtgcagatcgtgatatcttcatccggtttaaatgccttgttttttacatccagattcagattccggtatgccagcacatacaatccattttttgtatggatgcttaaaatatttagtgccagcttttgaatatgaagcgttttcccctgtttcgtgccccggttcatgcgccgctgaaaatttgtcacgatctctttaaactgttcctccgacaactggtactccccgtcacgcacctgatctccgtcgatatagcgcaccagttcataatcggtcgtatacggcgtggcatccagtttgctgcacatttccagataattcagtatttttaaatttgccgtgtttgcaaaaaggttctggtagcgttccgggtgcagcgcgatatcttcgatcagccgctcattctccgggcagtacgagccttccacgatctcggtcgagaggatggaatcgatatagatcttatcgtatccctcaatcgagcaccggttgagatgaagtccgtccacttttaaagtcttgttccgtgggtctaagtcccggattccgatccagtagttcgtgtgcctgccctctttgttcagatattcaattttcagccattttccttcgtggatagctttgaagatatctctgtgtatactgttcatatgtttttgccagtcttcccaatcctcctcgcatactccgccagctcccggttcgcttcatttaacggtccaaactcttctaccgcacaaatacattttttacagctatcgatcagccgctttgccgcctgcaccttatcctgtccaaccgggtaaaatgccttttctgccacaacttctgaagcaagtgccactgctgccttgtactctacatcattttcctgcaggattcccgctgcaaacggaatgttttcgcgccacagcctgttgtataccgggatgccgctgcccgcaccgccgatcacaaaaatctgtgaactgaccggatctggattcttcttaccacatccaaaatttttgccagagcaattctctgcactaaaatctctcgaaacaactgccttctcatgtcccgtgcacaaaaaaatctgccccgtcaccggatcaaaactctgatccgccaccccgtataattcctgcacataatttccggcaaaaatcttctccggtgtgccgatgcggtcgatgcggtcgcctctgacacaggcgaccgtatcggaaactttctgcgcaaggtcaagctcatgtagtgacataatgaccgccatctttttatctcttgcaagcatgcggatatttgtaagtatatccatcttaaagcccatatccagataggaggttggctcgtctaagatcaggatttttgtatcctgacagattgcccgcgcaagcatcagacgctggcgctgtccgtcgctgatcttcatgaaatcctgatcctgcacttcacctgcatggacaagcgcgatcgcctcatccacttttgcccagtcctcttttgacaggatgccaaatcttcccgtataaggataacgcccggaggcaaccacttccctgccgctcatcagctccgtgcggaggcgttctgtcatgaccatggacaatcgtctggaaatctggctgtcttttaattcatccatggatgcttcgcccaaaaatacggttccatccagtttctttaactgctttgtaatcgtctttaagatcgtggattttccggaaccattcggcccgatcagtgtcagtatctcccccggccggacagaaagattcacatccccgatcaaaggtgttttatcatagccgacagtcagatgctctgtgcggatctcctgcatatataactacctcccctcctgttttctcaacattgctgcgatcacgaccggcaccagaaacagtgccgtaaccgagctgatactgatttccgtcggcgcaaacacggttcttgcaattccgtcacaaaaaagtgtcacaactgcaccacacaaaaaacaccccggaatcaggataatcgggcgcgctgtttttgtcgccatcctcaccagatgcggcactgcaattccgacaaaggagatcggtcccgcaaatgccgtcacgcaggcagacagaaggcttgataaaagaatcatcgtgaccctcaacacttttacattgacacctatatttctggcatatgcctcccccatctgatatgccccgatcggttttgccagacaaaaagtcacaagcactgctgcaccgacgatcacgacgatcatttttatattttcccatgtcatgccggaaaaacttcccatcgaccagttgtgaagattgacgatattcgaatcgctggcaaatgtgacgcagaagtccgtgatggcggaacagatataaccgatcatgatcccacagaccaccagcagcgacatttttgacacgcgaaatgaaattaaaagcacgaatcccatggcaagcatggaacccacaaacgcagccataaccatgccaaaggaactgatcataatgcctttttccagcaggaaaatcatggtaagtgccaccaccagttttgcgccggatgaaattccaagcacatacggtcctgcaatcggattctggaaaaagctctggagtaaaaatcccgacactgacagtgctcctcctaacaagatcgcagcaaggatgcgcggcagtctgattttccacacaatctgtgaaaatgtctcatcttttccacttcccgcaaggattgcaaacagatccgatgtggatatgtccacacttcccgccccgacattccataaaaacaataccgataatatgataattgcaacaacaaaagagatgatataacgttttttcatgatttcctctggtttatatgaattcctgtcagttgattttcttcaaaaaccggtactctgcatccgtttccccattcagtaccttattgagatcctcaatgaaatcacaggttccactggtctgctggtaaaaattgcttccggttgtgtagacctgtcctgattttactgctttaaagtcggcaaacagactgtttttctgtaccagttcatcgatcgatgtcagttctccctctattgtaccattgtaaatgagaatgtcagcatctttttcggccgcatagaaatcttccatctgcatttttaatgtggagagtgcattttcctcttccgggacataaccatttaaggaataagtgccccccgcaagttcgatcattgatgatacataatcatttggttttcgtaccgtaatcgttccatccgatgcaactgcaaaaaatgctaccgacagccccgttttttctttttccaaaatcggctcaatatgtgctgcctgcgcatcaaaaaacgctttggcctgctgttctctcccgaacaaaacgccaaaaagctttatccattcgagtcttccaagcgggtgcttttcatagctggagcgctcgatcatgaccttgatcccaagttcttctaatttttctttcacttccgggttgtgcgtgatcatcgtattttcaaccgcaaacgtgcatccaccggaaagtaaaagttcatagtcaggcgcactgtatttcccggcatagatcagatttcccgctgccatcgcatctgccgcctcttttacataccagtctttttcttttactcctgtatatttcagatcggagacagcaccgatctggcagactaaatccatcaccgcactcgacaccagatatacattttcaagcggctgttgtaaaactgtcacatctgccggaacatccgccggcactttgacaccttttggcacaagcaaaaaacgaccgttatccacgatcgtaatcagcttataagcaccatattgttctacttcaaactggtcggcgtaggataactccatacgcccattgcagtctaagtctttaaaacctgccgtttccggaaattgaaaagtcagggtgtaatcaatctcatgcggcgtactcattgccgtcgtatcaccgatcacatccatctcacatgggattccatcaattggaaatgtgaatgtagagtttccaccttcattttcattgagatatttctccccgttcacgatcatgtaatcgtaatgcgtactgctccatgtgatcgtcgcatatgccactccatccttcacagtaactttcgcctgtgaatccacagttgcttttccgctgccgccttctaatgtgacttccaccgtatattcgccatcctcaggaactgagacttctgtgccgtctgcctgttctgcggcatcatttccagtcatgctttcttccgttccatcctgatctgcagttccctgcacattttcttctgctgcctgtgcatttttctctgtggctgtacctgcctctccctgtacactttccgtggctgtctgaccagccccgccttctactgcagcggcattattttttgcaccgcatcccgtgaatatctgcatgcacatcattgcggataagattactgcggtcactctctttttattcatacaaatctccatttattagttatctgtctcctgcggatcagaaacgcttactttgtgatcgtaccactcgccttttgtgccgaggattgcaagatcaaattcttcatctaatgcttctaccggcacatcaaaaccatatacctcgtcggtggttccatcactgtattttacagtatccgttgtcggctctaaaatatcagcaccgtcttttttcgcatcatctgctgttccgacaaacagatttacaattttttttgaaacaaggctgatatggatcgtcatttttccgttttctacggtaaggataccacgtccctcatctgcctcatttacatgaaacatgctgctgtctgtatcaaactttgcggtgtaaacaccatcctcgagagtaccaacggtactctctgtggtggatgctgactcaaggtttccaagggaatcaattgcatcttttgtatgatcaatatagatctgctggattgcttcgattcttccaagtcctgaaatctgtgtatcaacgctgtcaaaatatccacttgctgtgaactggctcttccaggaatcttcgtcgtcgcctgccatatcgttgtttgcatgatctcctgcaacaaccataagaggtcttaaaacaacttttgtataaccggcttcttttactgcctcaatcacattttcacatgctgtctcttccggttcaccctcaacagttccgataaatacattatcataggaaagatctttcatctgtgctgccatctggctgtagcttacctttgcagaatgagaagttccatgtcccataaatacgaatgctgtaccatcttcttttgctgcatctaaagaatcatatcctgctgtctttactgcctctgctgtaattgcttctgcaacttttgccttatcctcattgatcacagttgcatcagatcctacttcaccaagcattggctctgcaacggtaactgtctcaaatttgtctttataattgtcaagtgtctctaccagctcgtcatactctgcaccatgcattaagtgtgtcggctgaacaacaagattttttactccgttgtcaacagctctctctaatgcctgatccacattatcaatcttttcgtcatctcttgcctgtacatggttgatgatgatctgtgcggtaaatgctcttcttacagaccagtccggatatgctgcttccagtgctttttcgattccactgatatcctcggcacgactgtcgttaaatgaggtaccaaaacttactacaagaagttcattttctccaatattatcttcatttaacggatcatcctttgaggcatctcctgtatctcttccgaaataatccggatctgcgttctcgccggaaactaattccttctgtgcatctgtcaatgcatcccatgcctcttttgcctctgcacactgtgagtccgtatcatcatttcttgtctgaacatagatcgcatcgatcagttctgcgacgtgatcggctgccgcctgatcgtcaacttccgtgctctctacggtttctgttgcctctgttttctctgaagatactgtctcagaggtttttgctgtgtctgttgctgctgtgttgcttccgcatccggcgaccatacctgttgcaagcgctaatgtggtaagtaacgcgatagttcttttcttcataatgctctccttattataatataatgtatcgttcatagtacacaatggaatttttccacacaaagaaacactccgccttatttgagggcggagtaataagtctgcataaataagctgacaatctgacagcctacatttacggtacgaccaattactcgtgatccgggaaatatttccctgtaccagacaactggcaggtttcctggctgaaagatcatcacacagattccgccttcccaacatactgcaaagtacatcagtgacttatctttggaatctgcactccctaatcacagtgacgagatcgtacaggaatcgcacctgtttcccttttaaccgacctatttttaaaatgaaaaatatactgtactttatgtactgctccatttcccggataaaaacagccggcaccaattatcttctctatgaaacttttaatatactagcatatccactccctatttacaacaaccacttttctcttgcaaatcattcaaaatatggtatactaatcaagtatttgcaaaaacatatctggagacgtatcgaagtggtcataacggggcgcactcgaaatgcgttagccctccggggcacgagggttcgaatccctccgtctccgctcttccaaaaggaaacacaatttgctttatattcgtgtttcctttttcttttgacactttttcgttatttctcataattttgcttctaaagtactatattttttcgtaatttatgtctaccattttttgtcaaaaaatagtaaaataagtgtaattaacctataggaaagggagcttgatatccatgaaaagcaaaagcgtaaaaaattcactgacactaatgtgtcttatgattgttcttgtatctgtcatagtcattggcggtatttcaatttcaaatatcagcactatgacttccacggcaaacaagaattatgaaaatgccaggttagatgggtacaatactgagatcaaaagtcaggtacagtctgtcatcgctattttacaggcagaatacgacaaatcccaaaacggtgatctgactgaagacgaagcaaaaaaagaagcagcagagatcgtccgcaacatgcgttacagggatgatggaagcggctatttctggatcgatgataccgactacaacctcattatgcatccgatcttaaccgatcaggaaggtaataaccgttacgatctgacagatcagaatggcgtcaagatcattcaggagatcatgaaagtctcgaccggttctgacggcggcggcttcaatgaattttattttacgaaagccgacggtgttaccgtagcaccaaagatcgcgtactctcaaatctttaccccatggaactgggttgtttccaccggtaactatgtagatgatatggaagcggaaatgaatagttccaaaaacgaagttcaggcgaaataccatactatgatcacagtcataatcataattgatctgatttttacagttatcgtattcattgcttcccgtattttcggtaatacgatctgcaaacctttgatcgagattcagaattttgcaaacaggatgtcgaccggagacctgactaccggagtcaatgtttcaagtaaaaatgaacttggaaaaacagccggtgcacttgatcttgcacagcaggaggttgtcggacttatctccaacattgatggagtttcctctcatttacagtccgccgtttcggatttcaaaaagaattttgacagcatgaacgaatctatccagaacgtttcgactgcaatcaatgaaattgcccaaaacagtaactctcaggcagcatcaacttcaagtgcctctgaaaatattgctgagattgccgatggcatcgcagatacttcctcagaaatggaatcccttgatcagaatgcacagctgatgcaggatcgttccaataagtccatggaaactttacacagactgattgatgtcaattctacaaccaagactgatattgattctatgtataaccagactgcccagacaaatgattccgtcaacaagatcagtcaggcagctaccctgatcagcgaaattgcatcccagaccaacctgctttccttaaatgcttccattgaggcagcaagagccggtgaagccggacgtggattcgcggttgttgcagaagaaatcggcggacttgccacccagtctgcgcagacggtcagtgagatcaacaatatcattagtgagttaagccagaactccgaaaaatctatggagctgatgaagaaaatgagtgaggcttccgacgaacaggttgcagctcttgaaagcacacagcagatgtttgaagacttaaaaggtgctctcgattcctgtatggcgtccatccagaccattacaggaaagatcaagaatgtcaattctcagcgtgagcttgtcacagagagtatcgataccctgacacagcttgcaaccgacaatgcatcctccacagaagaaacttccgcaatggcaaccgagctcgatgccgttgtccgtaaatcttcggatctggtatctgctttagcagatgatattgaaaaactttctgcagatatgaaacagtttaagctgtaaatcatatgaacgatatacaaattaatatttaatcccaaaaaaccgtgcggtaattttaatccgcacggtttttataactaaaaagcagaactgcacccgtgcagccccagcagtaaaacgagtggagcaggctcaatgccgcttcctcttaagcaaaacattttttgatctgttctgtgatctcaccgtctatccatcccttttgcaccatattttccaatatctcacatgctgcctcgtgcgtcattccggatttatacggtctgctctccgtcagtgcctgatagatatcaatgcacgccatgatacgttcctgcctgtttagctcgtcggcagttttaccgaacggatacccggtgccatcgagtttttcatggtggagcgccgcccagtcacggatatcttccattccttctgcctgtgataagatcagatatgtgtatcccgcatgatttttcattttagaaaactcctcgtccgtcaggcgtcccggtttttctaagatatcatttccgattgctgctttcccgatatcgtgcagcgcgcctgccaggtacattttcagcaccgtctcctcgtcatcaccgagatatctggataatctggctgcattttccgcaacaccgagtgaatggcggcttgtaaattcggatttatagtcgatgatctttgcaaacagattggcaaaatttttgcacatttcatcgcttaaatcccgcttttttctcggaacaatattccacagccgttcttctaaatctgcatctccaagactcaaaaaatgttcttgcccaaacacttccaaaaaagtatctacgcatgcagtatcaaattttgtccctttatttttcaaaagataatctttcgcgcgctgccacacggcatcatcaaataccggcgtccggcagaacgcatctaaaatatcacacagatgaatgatccttgcaaaaagagggatctcttcccacgtttttccaaatggtccgcttccatcagcattttcatggtgatataaaatcacatttttcacatccgtcagaaacgggtacatttttaagttttcctccccgtaaatgcagtggatgccaagctgctttgacgttatattttccgtattattttttgtaaggtcattgtgaaattcctcataaatatactgcgtcagcgcattgtcgtgcagcagcgaacacgccgcgagatcctgcagggcatctcctgtaattcccattttttgtgctgtgcatacgctcatatatgcaactctttttccatgttttgtcgcaacatgggtcagttccgcttcgacacagtcgagtgcataagagcatgcaccaagcagaccaataatgtctaattccatttcccattcactttcttttttatttttttctatcttagcacactaaaatcacttttgataccacagaattgcttttcatttcagaaaattatttctgcgggtgaacgccgtttttccaccgtgctctgacagcatgaacggctcattttccagattttcaatttcaatcttttcttttacgcaaagcggatgtgcctccggcagcacgaccatgtattcatccatttttgacatatcactttagcagcttctgccacacactctcactgtgaccggcatctttctcatacaaattgatatactctcccgccgtgctgcgatccttaaatgccgggtacaaaaatccgctctccggcacgcccggctcatactcgccctctaacggactgaccacacagatcagatattcgtacacttcctctgagccctcctgccatgccttatcggtccctttgaccgggacatcgtatctcccgtggaacaaaaaacacgcatatgggcaccccggctgatatttctctccaagcagctcatagaaaagatccgggaatgcatcgtctttcagacctgtctccctgatcccgtcaaagagctgccagatactgcccggctttcttttttcttccgggatccggtattctcttaactgttcatttgtttttgagatcagcaccgtcttggcaagttctaagtttttggctctttcggatgcagacagttttaagaaatgcgtattgaatgttccatccacatatccctcttcgtcaaaatatgcgcctgcgatccggtctatggatgcccgtgcgggagtcatgcgcctggtcagttctaacatgtcgtcgcgatttatcattttggtcctttcattcccgtaatttattccattaaatttacactatttttacactatttttcactattctttcactattttttcttaattactttccttttttacaccagcccctgaatcaggataaacaggatcagcagcggcagtataaactggaaatatggctttaactttttcgaaatcttaaggccctctcccgtatttgcctcgtcaatatatttatcaaatccccaaccccactttgttacgctaaacagcagatagatcagtgaaccgaccggaagaagcaggttgctgacgataaaatcctcactgtcgagcacatcacggccgcctatcagatgcaggctgctccacacattgtaacccagtacacatggaagacttgcgaacaggatgatcactccattgataaatgcagctttatttctgttccagtgaaacatatccatacaaaatgacataatgttttcaaacactgccatgaccgtcgaaaaacttgcaaaggtcatgaaaaggaaaaacagacatccccagatccgcccgccagacatattgacaaacacatttggcagcgtgataaagatcaggctcggtccggcatccacttccactccatagctgaaacatgccgggaaaatgatcagtccagacatgatcgccacaaaggtgtcaagaccgcaaattcttgcgccctcaccggcaagcgagtgatctttacccatataacttccgaagatctccattgcggcaacgccaagactcagtgtgaaaaatgcctgattcatggctgccgtgatcacatttttaagccctgtctctgcaaccgtgtccagattcgggacaagataaaacttcacgccttctgctgcaccctgcagtgtaatactgtgcaccgcgagaacaacaatcagaatcagcagcgcgctcatcatgatcttgcttattttttccagtccgttctgcagtcccctgctgcacacaaaaaatcccagtatcacggtaagtatcatccagaacgccatctgtcccggatctgcgagcagattagaaaatactgccgcagtatcgtccgcagtcatgccggtctggaattcgccttttaaaaatttaaagaaatacgataccatccagcctgatacggtcgtgtaatacatcatcagcatatagcagccaaacattgcgatccagccgtgaatatgccacttgctgccttctttttcgagtgctttataacctaacacggcgctttttctgctggcgcgccccacggcaaattccatggtgagcaccggaagtcccattgctattaaaaatatcaggtagaacaggacgaagatgccgccgccgttttgtccagccacataggggaatcgccagacgtttccgattccgatggcgcagccggcgcttacgagcagaaagcccaggcgggatttgaaggattctcgtttcatttttattttgctccgtttctattttattttttacttggtggattcaaattcttttagggcgctaagtgcctgaccaccaagcaaatacaatattccggtgttgaagatagtcatcagaccgattccgacgtcgccgagatcccatacgaaagtgtaggcagcgattccgccgatgaacagcataaccagtgcaaggattttgtacaaggtctgaaagatccatttatctccaaataaataggcgacgttacttctggcatagaagaggatgcctaagaatgtggagaaactgaataaaaacagtgtcactgcgatgaatatgacgccaaattcgcccaggtgatagcgcattgcggactggagaagatccatgccttcttttcctgctacgatattttccggtgcagtgagcatgatcatagcagtgcagctgcagatcacaatggtgtcgacaaatacgccaagtgcctgtgtcagtccggcgctgaccggtgtctcacattcggctgctgcggctgcacaaggagcagagccggaaccggcttcgtttgaaaacagtccacgcttgatgccgttcataaggacagcgccgaagccgccggaaactgcctgtcttagcccaaacgcctcctcaaaaatccgaccaaaaaccgccgggatgcttccaatatttttcaggataataaatatcgtgattgcaaaatagcagaccgccataaccggtacgaccacgtcaagcacttttaccgtcgcatttttccgaaggacgatcaccgctgcgatcgcaaccagtacgatcgttgtgtaaagtggcgggatgccaaatgcattttcaaaggaagataccacggaattgctgatgacctggctgatgccacaccagcagattagtcctgaaattgcaaaaagtaccgcgatcagcacatgctttttcttctttttcaatttttcttcacagaaatgatggatataatatgcgggacctccgcgatatccgccatacaaaggatctttttccttgtgtaactgtgcgagcgtcccctccacaaatgcggtcgaggaaccgatcagcgcagtcacccacatccagaacacagcaccggcaccgcctgccgagattgccgccacaacgcctaccagatttcccatgccgactctggtagccgtcgagacgatcagcgtctgaaatgtggaaagactgtcctttgtttccttttttgccataagtgcttttatcatatccgggaaaagcctgaccggcaaaaatcttgtgcggatcgtaaaatagattcctgtcggaatcagaagaattacaagtaaagaaatccctatgctgctttcctgcggcaaagggatcgtaatcagatctccccataaaaatgcgtagatcttttcaatgaccgagactatcatagtatataccttttccatccttagtttgtactttctctatcatactatagattgtctctttcatgcaataaacaagtgataatttaatgtaatatagttgaaatatttttattctgttacattttcagtttccggaattttaaatttctggatcattccctgcagactctctgcctcactgctcatctcctgactggcagccgcacactcctcagatgttgcagaatttgtctgcacaacgtcattgatctgctcaattccctcattgatctgctggatttctgttgtctgtgtctctaatgtatccgcaatatgtgtaacgtcttccgtaatcagcttggagttctctgctacctcctccagctgtgccgcagtctcttccgcgattatcatacctttttctaccgcattcacagatgtttcaatcagtgatgctgattcttttgccgcctgggcactctgttcagctaataaatttacctgattcgctacaactgcaaatccttttcctgcctctccggcccttgccgcttcaatagaagcattcaacgccaacagatttgtctgggaagcaatttcattaattgttgcaataatcttatcaatctcttttgatgcctcattaatctcatgcatagaagcaaccatttcatgcatcttaccattgctgtctgaaatggcatttccaagttcatccactcttccactgattgcttttgcagattgtgaatttttttctacctgttcagaaaccccggcaactgtagccgtcagttcttctacaaccgctgcctgattcgtagctccatctgcaagatcattggaacttgatgccacctggtctgctgcacttgaaacctcactcgaaacatttttaattcctttgatcgtttctgccatactcttctcaaatgacatgaaagaatttaaaataccgacaaaatctcccttccactctacttccggctgaacatcaaaatttccttctgagaacagtttcattgcacgatcaatatcatctacataagttcccaaaatacgaattgatttgcgcatactgtgcgccagtcttccaatctcatcttccgaatgatattccagcgcactgtgtaaatttccttctgtcagttcccttgcaacgtcttccactgcacgtaacggatccagaattgtttcaagtacctttttacttattaccttagccagtgtgcatgcacaaaccagacagataataatacacaccattcctgcaacagcaaaaataattgtagttcttgcagactgctcacttacttcatctgtgatctcatctaatcttatggcaatttccacaagtttatttaatgcaggtgtacaactattaaaaatttcatcaatcgctttctctttttcgccatttttaatttcttctataatcgaataaccaatgtttccccaatcagaaagagcagatgcatactcattatattcctcatccggtaagactttggttttctttaatatttccagctgcgaatccacttctgtaagcagcttttttacattctgctcataactgtcataagcagatgtatcattatttaatgccatttccctgatatttctcgctgacgtattcacattgatcctgcagatttttaccgcctgatccgcagcattgacatcatctatataatgtaacatattagcaaataacacacctatgaccacaatagaaaacagacccgaaatcaacatcatactaatgacttttccgtagccatagtttatcctctcctgcagatgcatattttccaatttgtctttcattgtactcttttgtgacaacatagattgttatttcctttctctattgaatttttactcttatataccaaattccattttcaaagtcaatacggtttcggttcaatttttcatattctacttttcgcataatattcagcacatcccacgcaaaaaaattcagcacttttactaaaaaagaaaaccaccactccccggctcccggtttgtgatggtttcctgctatattattctgtccacttcttaaattcttcatccgtacatttcacataatgtgtcccggacaccagatgatccgttcccttattataatcaatgccggaagtcttgtaatcgtagctcagtgccacacgatttttttccacgaccggattcggtgcaggtatcgcagaaagaaggctcttcgtatatgggtggattggattctcaaagatttcctccgttgttccggtctctaagagatgtcccagatgaagtaccccgatgcgatccgaaatatatttgaccatggaaagatcatgtgcgataaacagatacgcggttcctgtctcctgctggatatccttcatcaggttaacgacctgtgcctgaatggaaacgtccagcgcagagatacactcatctgcaatgatcagtttcgggttcatgatcagcgctctcgcaattccgacacgctgtctctgtccaccggaaaactgatgcggataacggcccgcatgttccggcgcaagtccaacttttgccaggatgtttttgatcttttcctcacgctctgcgcgtgtcttgtacatatgatggatatctaacccctcgccgatgatatcgcgcaccttttttcttggatttaaggatgccatcgggtcctggaagatcatctgcatctgcgtgcgcagtgcctggctgtttgccttattgatcctgccgctgatgtccattccattaaaattgatctccccggcggtcggatcataaagtcttatgatacttcttccgatcgttgattttccggaaccggattccccgaccagaccatatgtctcacccggatagatctgaaaacttacgttttctaccgcatgcacggtatatgtattacttaccttaaaatattgtttcaagcctttcacggtaagaagaggcttactgttttcattcaccgtcatcgatcttagcctccttcttcattcgcgcaatacgctcttttaattcaagcggcatctctgccttcggtgcccgcggatctaacagccaggtagccgcataatgtgtatctgtcacctgaaacattggtggatctgccttgtcgtcgatctcaagcgcaaactggttacgcggtgcaaacgcatcgcccggtttttcgtttaacaggtttggcggcgaaccagggatcgtgtagagtctctcatccgcagtgtcaagatcaggcattgcagagagcagtccccaggtatacggatgtttcggatcatagaagatctcattgatcatacctttctcaacgatttttccggcatacatgacattgacgtaatctgccactttggcaaccacgccgaggtcatgtgtgatgtaaataacggaaatgcctctctctttctgtaccctgcggatcagctcgatgatctttgcctgaatcgtaacatccagtgcagtcgtcggctcatcacagatcagaagatccgggttgcaggcaagcgcgatggcaatgaccacacgctgtctcataccaccggagagctggtgcggatagtttttcatacgtttttccgcatcctcgataccaacctcttttaacagttctactgccttatcccaggcttctttcttcggtgtcttaaaatgccagatcataccttccatgatctgttttccgatcgtcatggtcggatcaagactcgtcatcggatcctggaataccatagcaattctttttccattgatatgtcgtctgatccactttttatcttttgttaaaatgtctaccgtctgcggtgttccatccgcatgatgataggaaaattctatagtaccgcccgttactttcgcattggatgccaaaatacccatggcagctttcattgttacggatttaccggagccggactcaccaacgatcgcaactgtctcgcccttcatcaggtcaatattgactccacggatggcgtgcacgcttcctgcagtcgtctgaaacgtaatatccaggtcccgtatttttaaaatctgttcttttgtctctgacatatacgaatcccctttcttacatttctttcagcttcggatctaatgcttcacgtaaaccatctgctacaaggttaaagcttaacatcaaaagagccattacaacgatcggcggaatgatctggtacggatgtgtggtaaaactgttaaatccttcggagatcagtgaaccaagtgaacactgcggcaccggaataccaagacctacgaaacttaagaacgcctcggtaaagatcgccgtcgggatggagaacattacctgtgtaatgatcggtccaatgatatttggcagaacttctttaaagataataaagaaatttcctgctccaagtgtccgtgatgcaagtacaaattcctgctcttttaatttcagcatctcagctcttgcgatacggctcatgccgacccactccgtcaacatcaatgcaaaaataatggtaagcatacccggctgcagtaccagtaacaaaagtgttacgattacaagacgcggaataccgttcgcgacctccagaaaccgctgcatgaacatatcgactttcccgccaaaatatccggagatcagtccatagctcataccgatcaccatatcgatgatagcggctgctacggcgataatcagggaaacgcgtgcaccggaccaggtacgtgtccagatatcacgtccgaagttatcacttccgaaccagtagtaaagatcatccagacctttttcttcatagtaattgatctttttggttccggtcgttgttttcatgccttcactaccatcgaagataccaagtttttcaagaccttttaccctcggtgcaaagttcttctgtgtcagtgactgttcggagtaactgaaatcattcatccccgggccaataattgcaaataccgtaatgataatgatcaggatcagaccgatcactgcactgatttttttgaaatagcggatcaatacgtctttccagaaactctgtgctgcaaagttatcatctaacgcaagttcgccatccgtatgtttaaatttaaaatctgcctcgaccggtatgtagccggcagcatcatttcccacattcatggtattttcctgtgacaccatatcagtctcctttctttgccagacgaattctcgggtcaatgattccgtaaaggatatctaccacaagcatgatggcaatgtacattgcagaataaataaagcttaatgcgataaccacgttgtagtcgttcgactgaatggcatttaccagaagacttccgacacccggtattgcaaatattttttcaacaaccagagaaccggtcatcagatcgacgatcagcggtgcaagcacagtgatgatcgggatcagtgcatttcgcagcgcatgtttaaaaatcagcgctgaacccgaaattcctttactctccgcaagcagcatataatcgctgccgagtacttcaagcatttcacttcgtgtaaaacgggcgattgacgccatcgtaaacatcgaaagtgagatactgggcagcacgcttgatccgaaaatatcgctctccgaaaacagcatcgggaaccatcctaatttaaatccgaagttatagctgagtgccagcgcaaacacatacgatggcaccgacacaccgataaccgaaatgatcgtcgctaacgaatcccatatcgtatcatgctttaacgccgcaagaagcccgagcagaagcccgaccacggcaccaattaacaccgcatatcctccgatactgatggagatcggaagtcttgtttttatcaactgggaaattggtgtattctttgagatattgtagcttacgccaagatctccctttaacatattgcctacatatttcacaaactgtaccggcagcggctgatccagtccatatttcgtatacagtgctgctctctggtctgcatttaacttctcatcgttgaatggagaacccggcatcagctgcatcaaaataaacagaacgagtaaaattgcaagcagcgtaaacagagacgttacgattctcttaagtgcatattttttcacgttctaatcctccttgttttccgaaggaaaatgcgactgcctttgcaggagcagaggattttcctccttgtttttccgttcacgacataggaaattcctgcctcatttcctatagcgtcaacaatatgatgaaattgccgcaccaaagttttgcactttagtgcggctatattcattttcctgtaaaacaggatttctactgtctaaatttctttattcagtctttacagcatctttgtatacacggttgatagctaccggatgatactcaacgcctgttactttagaagaaagcatctctgcgttgcactgtgtgtaaagcggataaataactgcctcatccataacgatcttctcagcatcgtaaagtcttgcccagcgtccctctgcatctgtgcaaagatcaccggttgtacactcatcaatgattgcatcgtaatctgcgttgctccacagaccgtagttgttagagttatctgttacccacattccaagatatgtcattggatctgcgtagtccggtccccaacgtgttaaacctaactggaagttaccgttctgcatgtcttccacacgctgtttcttcggctcaacaaccaggtttacggtcagtcccggaagagctgtctcccactgctcttttaatacctgcgctactttctgaggtgcgtcatctgcatctactaccatgtctaaagtgatctcagattcaccaagttcctctaaaccttttgcccagtaatctgctgcttttgcagtatcataagcacatacatcagagaattttgtctgatcttcggagaagtcagatccgtccggacctgctgcgaactgcattggaactgctgtgtatgtagaagcagaaccatcttttaatacatctgctgtgatggaatcacggtcgattgccattgtcattgcaagacggatatttaagtttgcgagttcaggaacagaattcatattcgggctgacataccataagtaaccggcaccaacggttgtgaattcaggatcatcttttacctgatcaacctgctcaccgtttactaatgttgtatcaagcgctcctgtctggtagctcattaatgcctgctgtgaatcctggattacctgataacttaatccggaaagttttactctgtcggtatcatagtagtctgcattttttgttaaatggaatgcagttgctgccggctgataagaatccagcacaaatgcaccgtttgataatactgtctcaggacttgttgcaaatgtatctccacaggaagtaaagaactcctcatttaccggatagaaagtcgggaaatacatcagagaagtgaaatagctgactggtacattcagttcaacctgaagtgtattgtcgtctactgctgtcacaccaagttcactcttgtctttctcacctgcgatgatctctgctgcatttttaatctgaccgatatcgcttaacatatatgcatactctgatgcgacatccggatcaacagctctctgccatccgaatacgaaatctgctgcggtaaccggtgtgccgttgctccattttgcatcggtacgaagatggaatgtataagttaaaccatcgtctgataaatcatagctttctgcgattgccggaactgcctgtccgtctgcatccatctgcatcagaccgtcggtgtaatcagcgattacctcaaaggatgttccgtcggtagcctgctgcggatcgagtgactcgaccggagtttcaagcataacattcatgtctgatgcgcttgctgcggcatctgttcctgcagcatcacctgctgcactgcctgtctctgtgcctgcggttgttccctgtgttgcagaagaactgttcccgccacagcctgcaagaccaagcatcattgttccggccatcaaaatagccaaaactgctttggtttttttcataatagtaatcctccttgttttgcggagcaaaatgcgactgcctttgcaggagcagaggattttcctccttgttttgcggagcaaaatgtctgctatgcctgcatagcatgtgcctcttgcaggagcagaggattttcctccttgtttttgcgaagcaaaaatccgagtcctctgacgaggagaggattttcctccttaataaaaatgcgcaaagatggctcttttcctctgcgcccctttacgctgataacactttagcacatcacattacaaaatgcaagtattatgttatacattttgtactttcgtactatttttccgttaatataatgggtgaatagcttttattttccctcactcaaacaatcatgattttaaaattttttgccaccttaatcctatgatgttgagctcaaatagtgcagtttgtcaatcaaaaatcttgcatgtactattgtcatcctataaagattcgggtgtcaaaaggtggttttcaattttgggtctgtcaaattgcacaaaaccgaacttgttttgttccgttgtccgaaaataagaaaaactaagattttctaattttctcccaaagtcacaaaaacagtctcggctttgtgcaatttgacaatcgctaagttatgaaccaccttttgacaccctaatcctataaagaaaaaaagccctccagccattagatttttcatctaacttctggagggcagttctcaaactggagttttgtaactaaaaacaacaaatccatgcaaaaatacagtcaatattactttgtaagatccttgatgacctctcctgcaaggatcagtcctgccacagacggcacaaacgcaatacttccagggatatcacggcgctcggtgcatttgtggacggttcccggagggcagacacaatgtgaccggcagctgatactcatatcctcgatcggtcttgtcggctgctctttggaatatacgacctttaattttttgaccccgcgtttttttaactcacggcgcatgacacgcgcgagcgggcagactgtcgtcttataaatgtcagccacttcaaattgcgtaggatctaatttattgcctgctcccatgcagcttatgacaggcacattgcactcttttgcgcgcatgatgatctctaattttgcagtgaccgtatctactgcatccacgacataatcatactcagaaaaatcaaactcatgcgcattttccggcagataaaaacattttctcgcttccacttttgcatccggattgatctctaagatacgctccgtcatcacatcaactttatattttccaaccgtttttctggtcgcaatgatctgacggttgatattcgtcagacataccttgtcatcatccacgatcacaaaagaaccgactccgctcctggcaagcgcctcaaccacataaccgccgactccgccgattccaaaaactgcaacttttgcatttgcaagccgttccatattatctgcacccagcagtaactgggttcttgaaaactgattcaacatatcctgtgcttttctcctgttatttccttatctcttaggtcctattatcatttgtgcaaaattatttttttccatatcgggaagttcattcctgcctcttgtacaaaattattttttctctatatcaagtgtctcattcatacttcccatacgatatccaccaaggtcaagcgtcacataggcaaatccaagctgtttcaggtaagaataaatcttttccctgttttccccttctaccagttttgcgatctcatccggcagcacctcgatacgcgcaatatccccatggatccttacgcgcacctgatgaaagcccatatccagcaaaagctgctccgccttatccaccatgccgagtttttcttcggaaattgtctccccatagacaaaccgggaggaaaggcatgcaaatgactgcttgtcccaggtgggcagtcccatctctttggaaagtgtacggatctcttctttgttcaacaaagcctccctgagcggacttttgataccaagctctgcaactgcgaccagtcccggtcgatagtcaccattatcatccatgttggatccctcagctacggcattgatatgatactcttttgcaatttccagtattttctcaaacaattcatgtttgcagagatagcaacggttcttcggattctgacgaaatccctcgatatcaagttcttccgacttgcatacaatgtgcctgattccctgctccttgcaaaactgctttgcctcctctaactcccttttcgggaaagaacaggaggatgccgtaactgcgatcacatgatccgcaccaagtgttttctttgccgctgcgagcagaaatgtcgaatccacgccactggaaaaagcgactgcaacactgcccagtgactttaaatattcctgtaaatttttatatttttcctgtactgactgcataataatcctttatttcatataatttaatctattcttaccactgtataatcgcccatggcatgactgacataaaagatcacatatacttttccgtcgtgcacataagactctcccatcgtctcatcggctccgtaatcgtccacatctccgtcaaaatgggtaagacttgccgcaagtgcttcctccgttggttccatccagatgaaattaaattccaaaatatctttcatcgtaatttcagtagtcggatttccttccggatccagcacggtatagccctgtgcagtatctgtattgtcttttccggcaaataaaattttagccgtctcatccggatctgcaaaatcagaaaatgtcattttttctccggtcttcatgttaatattaacggaagtaagtgctgcagaaggatgcgctgatccttcataatcataataactctgacaggtcagagaaagcatatcctttgtctgttcctgcacggtatatgtgagcaccacggaatcatttgcaccaaggttcatctcctccgtatctcccgtcatttccccggcagcttcttttgccatattttcaaagtaagtattccattcttcctgtttttcggtatcactccagcctgtaatcttcggataagaaatatcaatcagatccgtctttttgtagcttaccatctctatctgataatcagactgtgcgtcctgccctgcctctgttgtggcagcggcttctgtttcgtcctgttctgaatcctccgaaacctgtgaggtttctggctccgcttcattctgtactgtagtctcactggttttctgctgatccatagagcctgccgcaccagtgtttttattttcaccacagcctgctgcaaacgtgagtgacagtgataataccgtaattaatataagatttcttcttctcatatagatccccttttctgcgcagttttttacactgaattccttttcttttatagataaattagtctgccagcatctactgctccaaaaacttcacaatatcttccggtttttctgcaaaatttgtcgccccgtgttcaatcaggaactccttatcacggaatccccaaagcactgagatgcacggcagtcctgaattttttgccgtcatgacatccacatccgaatcaccgatgtagactgccgtatccgccggttttccaagttctgcaagcgccgtgtgcaccatatccggcgctggttttctcgccacaccttcgcgctccccgatcgcagcctgcacaatgccttcgaaataaatctcgtttaactctttgactgcaaaatcaatcttattcgaaacgattgcaagcgcataacctttttcctttaatttgcggagcaccggaacaacaccatcgtaagctctcgttttgtcattgcagtgttctccataatactttttaaaaacagcaaatgtttcttcgaatttcggattgtcaaatccgcccggaacggaaagctccatcagacgacgcacaccgtttccaacaaatgcacgcacttccccgatcgtgcgctccggcatctgcatcgttcgcaacgcatagtttgtggcatctgccagatcctctaacgtatttaataaggttccatccaggtcaaatacgactgtttcatattttttcataataatcctcatttctgcttgtgataaatcttttgatccacacatatttcctttttctaattgacactcacgtttcccgcaagcacctgcttgtaatcttcgtaattctttgcaaggagcgccggtgtatccagtccatacggacatttgctcttgcatttattgcagtgcaggcagttttcgatctttttcattttcgcctgaacctccggtgtgagctgcagtgcagacggagagcggcgcagcaaaagcgacatacgcgcacagttgttgatctcaatgcccgccggacacggcatacaataaccgcagccgcggcagaaatcgcctgccagttcttttcggtcattctcgatcagtgcacggatctcatccgtcatcgtcggtggattatcaatatatgaaataaattcgtccagctctttttcccgctgcacaccccagatcggcagtacattttcatactgcgcctcaaatgcataggctgccgcagaattcgtgatcagaccaccggataatgccttcattgcgataaatcccatgtctgcctttttacatttttccactaatgcaatatccttatccgttgccagatagcagaacggaaactgcagtgtctcatacagcccggattcgattgcctcctcggcaaccgcaagcctgtggttcgtgataccgatatgacggatcttcccctgcgcctttgcctcaagcatcgcctcataaagtcctgttccatctcccggtttcgggcagaaagaaggattgtggaactgatagatatcaatgtaatccgtccttaaattatgtaaggaaatcccaagctgttcccagaattcgtccgcattttttgccgccgttttggtcgcaatgtagactttttcacgcattccgtcgaatgcctcgcctaatttttcctcactgtccgtgtaaaaccgcgccgtatcaaaaaacgtaatgcccgcttcatacgcttttctcgccagttttaccgcatcctccgtgctgactctctggatcggcagtgcgccaaatccattcttatttactttgatccctgtacttcctaaaactaccgcttccataactcttatcgttttcctccttaaatcaattgtgttttaaccactatttgcgcccaacatcatctatgcagcagaatgcacacccacgaacattctattgttttaaataagggaaaaataacccgctcttattccgcttatcaaacatattattatactgcagtatctcataatttttcagccattttgcatcctcgccggccgcatcttccacatgtaaaaattttctctgcgatttggaataaaatcctctcgaattgaccgccggaatttcttccatcatgtcggctaaaaactgattgtatgccggaagcgcaatgcccgcgcgctccaacgccaatgttgacagataattaaggcttgtcagttccacactttctttgtcactgtcataattcgtccagataaaaaacggtacggtgtaaagattctcaagttcagacagcgtcagtccgcccaatcctttcccattcagatacggataaaaactggatgacaaactcggctgatgatccccgaaaaagacgatctcaaccggatcatccactttttcaaaataggagatcagatactctaatgccgaatcactctcgtggatcaatgacaggtactggttcacgtccggataattgatgccaagcatacgcgctttttcatcaaaattgtcatatttctccgtataaccgccatgattctgcatggaaatactcataatgaataaatcctcgttggatttcttactctcataacggtcgacgatcttctcatacagttcctgatctgtaatataatcacgcaatatcttcgtctggtcaaaatcatcgataaaatgcgtttcatcaaatcccatattcggatatacgatattgcggctccatccggtatcataataaggatgcattgccacacaggtgtaaccgatatttttcagatttgacaccagagaagtcggtgtatccgtgatatactgctgatagacaaccgaaccgctcggcagaaatgccatggaatttcccgtcaaaaattcccactcggaatttggtgttttggcgccaaacacggaagagagcgcatgccccttgatcgtattttcctccagtgaatcgtaaaacggtgtcagatcgatattggttgaaaaattccccaccacactaaggtccgcataggattcactcataaccacaataatggtcggcttcttctccgtttctccggtggctgtatccgtctctttgctgtactgatcctcaagttccttgactgcctctttcgaatacccatccggttgcgcaataaagcagtcgcggatacttaacacaaagtttaagatataaccgtttctgtagcttcctttctgttcccaggtctccgtcacaacaccctgcgtatgctttccaatgtatgcacagcacagcacggcaagtgaaatgctcacgatcgacatcggaatccttttctgaaaggaaacatgtaactttcggataaacgcaatgtacagcgtggaaaggagtattacataccctgccctttcatccagggcaaattcataatttcccgccacagaaagcccggtctggatggactttaaatcactgaaaataaactcatttccacgaaacagatatacaaaatagttgatcccggcaagggacaacagcacaatatgcgaaatcagacaggtcagtcctgtattgtctgtaaatacctgaacagccagaaaaactaccagacagcacaatacatttaacagcattttattgtcggatatttttgctctcagttccgcatccagtaacagatactggatatgatacgccgtaaaaatgccgcctgtcccaagcatgatcgcactccacagccatgaaagcttttcgtttaattcaatctttaaacttttaattccaaaataaagtactccaaatccaaacagtacccataccggaaaccttatcactgcaaacagcactgctgcaaagaccactgccacagcaagtcggatcagattctctttttcaaaatataactttatcttcatgatttcctcatatttccatctctcatagtctctttttcaacaaagttattctatcattacatacagatttgtcaattttgtgaagattaaacttttcttagtttttttctttttcatttacggaatatagttttatatacataaaatcccccttaagcagtttggaaacatttaccctgtctgcttaagggggatcatacatatctttgtgcgtttcctattgattggccagcctttattttgtctgttttttaaagaaatcatcgatcgctgcatgcagtttctgcgcatccatgctttttaacaggtaaccattcggctttaacgacatcacgtccataaccgtctgcgcatcgttttttccggtaagaaaaatgatcggaatgttctgaaattccgtatcttcacgaatcatctgcataaactgtttgccatccacgattggcatttcataatctaacaagatcagatccggtatatttaaggcaagatatttgatcgccatctcgctggaattgacaggaattacctgatattgatcttccagcagtgttttaatattccggaggatcactcccgaatcatccaccgctaaaatagttcttttttttattttataatattcatccatctgccttttgatgttttccaccatctccaccacattgatcggtcttataaaaatatcggtaaacatctgttttggaagtgtttcccagagtttctcaagctcttccacatttcccatgacaaacacaggcgttttatgcttgattgcatgatctacgatcactttaaccccaaccgcctttaatcccgcaataaccctgtcatggtatctgtcaattccataatctcttccatcgatacatccgccacataaacacgcagctgatccatggattccctgatgcattccggaacctgatattcttcaagttgttccatgatctgatccactccatcaaggtcaaactgttctatgcactggtgtatctgctgtaatgcagtgatccactccccgtccgaaaactctttttttgcatcctcttccttctctgcataggggcgcaatatattttttaaatcacggtacatggtaagcacatccggtgttttttcctctaacacctctgtcttaccctgttttccataatcctcaagttcctttgctgcctccgacaacggtactgcaccgatcagaagtgcagaactttttaacgcatgtacttcaatcacataatcactgatcataccctctttcaggcactgttcgatcttatttgccttactgtcgatcgtacggtaaaatatccggatcgttttcatcagtgctgccttcgaaccacagtgctttactccctcttcaaaagaaaatccggttcccggattttccggctgtatttcactgtcagaaatatcattcataagcagctgctttgcttcttccccgggaacttcctgtacaagttcctttggaagccacagctttaactgattacagatccgtgtgaaatcgatcggctttacaacaaatccattcatccccgcattcaaaaattcttttctggcatccaccattgcatttgcagtgagcgcaatgatcggcagctttttatacttctcatccggcagttcccggatcgttttcgttgccacaatgccatccatgaccggcatcatatgatccatcagcactaaatcataatgattctgctgtaccagatcgaccgcctgcataccgttttccgcagtatcgatctgcatctgaagcggttttaacagatctttcgccaccacaaggttcaggtcattatcatcaacaagcagaatatgtgctcccggtgcaatgaacagactctctgcctctttttcaatcacaccggatttctgctgttcataattcaccgcagacattggtgtaggatcaacaatagtctgttctatcgtaaagtagaacttacttccctttccatattcgctttctacttcaataactcctcccatcatattgactaaattctgcgaaattgtcaaccccaggccggttccttccacataacggtttctgtctatttccacacgttgaaacgcatcaaacagtattttctggtcctctttacggattccgatcccggtatcctccaccgcataatacagcattactttatccgtatttttctgtctgacacgtacagtaaaacgtatggaacctttctctgtatacttgatagcattgtttaccagattggtaatgatctggcggatgcgtcccatatccccttttaatgtacatggaatatccggatcaatatcatagatcagttccagcggacaatttgctatcctgttttccatactgatctttagatcatgaaacagagaaaatgtatcatatggctcatcaaacagctgcatttttccggattccatttttgaacagtccagtacgtcgttgatgatcgttaataatacccggccggaactctggatatttaacagatactcctgctccttcggagaatgatgcgaacgcagtaaaatctctgtaattccgacaatagaattcatcggcgtgcggatctcatgcgacatattcgacacaaaattggtctttgcacggtttgcatcctctgtctgcaatacaagttctttcatcagacggttctgctccatgatctttgtgatatcaacaactgtcaacatatatccctgtatgaaatcatctgttttcagtgcagtctcctcaacctgataatgcctgttattccagtcaaaaaaaccctggctgcctttcagaaattcgtaaatttccccatccccgcaatagctgccactctctttaatatcggtgacaaaattttcagccatcgggtttaagaaaagaaaatgatgatccgcatctgttaccacaaatgcttcgttcagattatcaataatataattttttgcgtttttgacaggatcaaataaaccgtatcttacaacagcaatactcaggaatatacaggataaaaggattccaagaggcgtgggatcatcgccttttaagattcccaacagacgcagagacagcaggatcattggagacagcatcgccgcaaccataagaaaatgaattttgcctttattcggcatacttctctgtgaacaatacgaagaaatgataatactgatactggtcacgatctctgccagtaaaaataccatatagacataatacattggtgctgcggatatttccagtgtatatccgcttaaaattgccttagacggggacagccagtaatctttatagtacaaatgatgataatcaactgtcgcaatcaaaatatagaatcccacattcacggcaagaagcgtgtggataaaccactgtggaatttttatatttctccagcgcattataaacatcagggcacagtaattgccgaaacattttccaagatactccatcttcccgatcacgatcagtgtctctttctgaccgccggcaatgtaaatactttttgccacaagcgtcaccagacagcaggcaattgtcaggataagctcccctttatagtttgtatcttctttccggaaaacgatcaccaataaagcaaaagccacaagtacaccaaatatgtgaagtgccagccattcaatcgcaaaggtcataacttatgctcccccttttgctcctgcacataaatagtacatttttaccattataccatgtcctggtgggtttgataactggtttttcgtaaattttagttgactttaattttcaacatctgctgccaaagccgcccgcactctctttttttcgaatctggcttcttttcaaacgtacatgatggattccttttacgaaactcatttgattttcctccttatcttccctgatatccgcagccttcccttcccggcatatcctcacttttcacatagcgggcattgaactccatattgatctcacgcagttcttttttcccgtcgatgtaatcctggtacatttccacgagtccggacatgcagccatcgcaggctgcatcaatgtttcccagtgattccgccacgatcttctcgcgttcttcttttgttgtctctgaaattaaatagcccattgcatttctctccttttcttcaaatgctgtgtttactattacacttgatttcattccatatttgatttcagttcgtattttgtttacctcatattttcctcgttattcctgattgccgtccagaggttgctctttactttttcaagacctgcagacagtatctcaagttcatcttcactcattccgcttttcattataccatctgtcatctcaaatatctcaataactttatccgccatctcacatccttcttccgtgagtgcaatcgtccaggaacggcggcaggcgggattgctctcccgctttacaagtcccatcttttctaaccggtcgatcgtccgcgacatcgtcgtaacttcgatcaggcaggcatcagacaattctttctggttcattgcaccgtgctccctcagttcctttaaaatgtgcggctgtccctgtcccaccgtaagtccaagctctataaaatacggccggataaaccgtcttcttaacatttcaacatcaaaaatctcatttttcaccctagcatcactccaattcaaactgtcctgtatacaactgataatatctgcctttctgctctaaaagctcgtcatgactgccgcgctcaatgatctcacctttttcaagtaccatgatcgcattggaatttcttacggttgagagcctgtgtgcaatgacaaatacggttcttccctccataatggcatccatgcctttttcgatcaaacgctccgtccttgtgtcgatcgaacttgtcgcctcgtctaagatcagtaccggaggttttgcgatcgccgctcttgcgatcgcgatgagctgctgctgtccctgagataagttgctcccatctccgtaaagcatcgtgtcatacccctgcggcagacggctgataaaggaatccgcattggcgatcttcgccgcctcccggatctcctcatccgtcgcatccagtttcccgtaacggatattgtctgcgatcgtcccggtaaacaaatgtgtatcctgtatgaccatggcaagggaacgccgcaggtcatcttttcgaatatctttgacgtcgatcccatcatatgtgatctgtcccgcctgaatatcataaaaccggttgatgaggtttacgatcgttgtctttccggcacccgttgatccgacaaaagcgatcttctgtcccggttttgcaaacaatgatattccgttcagcaccgttttctccgacacatagccgaatacgacatcatggaaacgcacatctccctttaacagtaccagttctcctgatgacagtttccacgcatacaatcctgtaatttccgcgcattctgtcagtgtgccatccgcatttttacagacattgcagagtgtcacttttccctcgtcaatctcctccgtctcgtccatcatgtcaaaaatacgctctgcacctgagagcgccgacaacaggaaattgacctgctgtgtaaactgatttaacggcatcgcactctgtctcacatatacaagataagccgacaggcttcccaaatccatgagcccgcggatcacaaacatgccgccgacacatgctgagagcgcatagttaaaataggaaagcgccacgatcaccggcacgagcatacctgaatgtgccagtgcatttgtagactccctgcaaaaccgctcattcatttcacagaactctttaaagttttccttttcatggttgaaaactttctccaccttctgtcctgccatcatctcctgcacaaaaccgttgatgtttccgagttcctgctgctgtctgtgataatattttttgctgcattttccattgtactgcatgaacaaaaaggtaatgactaaaaataccaccacgagcatggtcagctttacgctgagcaccatcatcattgtgatcgttccaaacaatgtcagaaaactctggatgatcattgcaaaactgttgttcatcgcctcctgcaccgtgtcgacatcgttggtaaaatggctcatgatctcgccgcgcgtgttgtcgtcaaaatatttcagtgggagtttctgtgtgtgccggaacagatccatgcggatttcgctcacgactttctgcgaggtgtgcaccatcagccggttatagccgagcgttgcgagcgcaccgcacaggtacatcacacccatgccgatgactgccaaaagaagtcccttcatatttcccggcacaatgaaattgttgacgagcggtttgatcagatatgtgccgcagattcctgcccccgcactgataaatacaagaattgccacaaggaaaaatgcccacttgtaatgaccgagataagtcagaaagtgcttcatggtctttttcgtatcttttggtcttttatatccaacatactttgccattaaagatcagctccttccttctgtgatgcatagatttcctgatagatctgattgtcatggagcagactctcatgtgtgccgattgcctccacatgccccctgtccatgataatgatctggtcagcatggcggacagacgatattctctgcgcaatgatgatctttgtcatatccggcagtttttctgcaagcccgcttcgtatcttcgcctccgtcgcggtgtccaccgcgcttgtggagtcatctaagatcagtactttcggctttttcaaaatggctctggcaatgcagatcctctgtttctgccctccggacacattgactccctcctgccccatctcggtatcataaccatccgcaagccggtccacaaactcatccacacaggcaatctgacatgcttctttaatctcatccaatgtggcattttcatttccccagcggaggttatcgatcagtgaaccggaaaacagcgtatttttctgcagtaccatcgcaactgcgtcccgaagatgtctgaccggatactcttttacattgattccgtcgatctttacctcgccctttgtcacatcgtaaagccttgggataagctgcaccagtgtagtctttgacgaaccggtctgaccgatgatgccgaccgtctgccccggtttgatatggaaagaaatatcggagagcacatattcctttgcagtgtccttgtatttgaaccacacatggtcaaattcgatctcaccttttgccacggcaatgtcttttgcattttcatctgtgatatcgattttttcatcaatgacttccatgatccgctctgcggatgccagcgaccttgtcatgagcaggaacacatttgacatcatcatcagggaattaagaattaacagcacataactcaaaaaactggtgagttgtccgatcatcatctgcccctcattgatcagccttcccccgatcaaaaggattccaaggatcgtcccgtacatcacaaactgcatggcgggcatatttagcactgctgttccaaatgctttttcagattctgattttaaattttcattgacgacaccgaacttttccacttcgtaatcgcctctgacataggatttcacaacacggattgctgtaagattttcctgaatacaccggttcacctgatcgatcgcactctgcatgcgcccgtaaagcggcccgacattgataataataagaattaaaagcactgctaacgtcggcagtgccacaagaaagaccagcgccagcgtcgaattgatccggaatgcaaacgatgtcgcaaaaataagcatgaccggactccgcccgaacggacgcataccggtggacaccgcattctggatgttcgtcacatcgctcgtcaggcgcgtgacaagcgacgacacactgaaatggtctatattggaaaatgaataagactggagtttctcgtactccgcctttcttatatttgcaccgagtccctgtcctgcaagcgcggaaaattttgcacttccgacaccaaggatcagtgctgacactgcacagagtgccatctgcagacctttttttataatgtaagtctcatccgcatttgtgactccataatcgatcaggtctgccatgagaagcggcactgtgatctctaagaccacctccacgccaatgcataacaaacctgaccatgcatatttcttatattctttcatataagaaaaaactcgtttcaacattacttgcacctccaatagttgcatatgcaagtattgtattgcggggttgggtggatgtcaagagtaaaaccatgctacttctctttttcatttttctctacaactcttataaaattatcacaaacttcctgataatctttatatcccataagaagcatcttgtcatacatctcagaaagtgcatcgagaaactttttttcatccctttttcttattttgcaaaatatcacatgatacggcgaattttcttttacatattcatctccaaaatccacagttaccttgtattttataaataactgatctgccagataatcttcactgtcaagaaatacatattgaaatttaaaaaatgatgggctctgtaatttataataatttttcaaaatgtattcctccatttctgtcttctttatatcttgtacatgccctccaaaagatccgttacgacctacttatctttttctgttgcatcctctgatttctgtcccagaaacaggggatcacgcatgattttctttaccatgtaagtttatcttcctttcatcatctgatgcttgaaaccgaacctccgcatcgcagtttcctgcaggttttctgctgggcgcatttaaaatttatcgtatccggatttaaatcactatgaactttaacgaataacaaataacgaataacagaaaaaactttatcactgaacctgaactattttgcactatttacctgtgaccgcaccctgcacggaaaaattttttaaagatctacctcaaactgcaccgtctggttatattgatccaatgccatctgcaattccatgacattctgagatacccgctcatattcctgcttgaccagatcaagatcatagttgacataccgatactcgggaactgcatttctggacatatacgatgttgtctccctcgtctttggaagctgtttgcgcatccggtcaaggacagcctttcttttattcaactgcgccatctttattaagatcgtgtccacgctcatctcggtatcctttacctgcacttttgcggttgcatttgtgacattcagtgcatgtttgatcactgcgatcttttcatcaatttctgcaatcgttgctgcaacctcagcataatcatattcggggatcacaggctcctcattgatcgcagccacataggtacttgacgcttcttccttatttatccagtattccttgtcttcttccaggcttttaagccatttatttgcatatgccgatgttatttttttcatttacctttttcctctcccaactatccttcatgatgatatcaatataagacatacagaaaagtttgtcattctaccgctagtttaatttccgaaataaaatataccataaacgaacgatatccccgtcaatgacgaggatatcttcaatactggtatgcaataatctacttaaaattataaaattgtccaaactcggcagcgattttcctgagatccatttgtagactgcctgcggattttcaaatcccatcacggtctggacatctttcaccgtgtaaccgagttctgatagaagcctcttgatctgtctgccggtctctttctgctggattgataaatacattggttccatctcatacctccttattcatcactgtcccgaaacacgaatttattttatcttaacatttttatgttgggaaatccagataaatcgcctgactaatgaattctgttcttctaatcagaaaataatctactttcctgtccttatagcatctttttgccaataattttaccactttcggcgctattcccttatttctcttattctcgaaaagatctattcctatttcaggtgtatcagagtccggattctgcaattccagacttccacaataaccgccatttatttcaaatacagaaaatactttatcttctccctctaaaacctgttcccacatcatatctttgcaatgctcatttaaaaacaatgtatgttcaccatttatctaacgatgcaattctacataattatcacgatcttcatccgcaatcgggcaaatgataaattcattatctgatacataaacctgcctgttcaacatctttcctcccttattgtgcaccatttctttcccaaattgccccaatctgtaataaatgcgccagaatctcatttttatacactgctgttatttccctgttgtctggtatactcctgtccacacttccagatagccttctctttaaaataaatactgatatcctcgtccgatatttcaaagaacacccgtaacatatccatatttaatgtctttccaaatcttctaggtctggtaaacagggaaaccagcggttttctgtctaaaaattctttgatcagcagcgttttatccacataataatattctgcctgtgctctgacataatcagaaactcctaccggaagcggtcttttctctttcgcggcatctttacaggttttcatatttattttctctcctgatggcaatatattacttcttttacggctgattataatagaaatgcggaaatatatcaaattattttgatatatttccgcatgcacaattttaattaagctggtactcatccaccacttttctcgccacatccggatagttcgtaataattgcatcgagtcccatctcacagcagcgccgcatgtctttctcattattgatcgtccatacatgcactaatatatttctccgcctgcagtcctccagataatttggataaaaaattttcgtccaccccggatgcagagcatctgcccgcacaacatccgccacataatcgaccgcatttataattccatccgcatacagtgcacctgtttttaattccgggcatttttccttcatactgcggatcgtataatgattgaatgaggaaactatgatacgatccatcatatcatatttttttgtcagttctaaaaccttatcttccattcccggataaaacgtgtttccagtcttcatttccacattaatggtgagatctgtcggctttatcagctgataaacttcctctaatgttggtatctcttcctctttgtattctggatgtaatttattaaaattaaacttttttaattcattataggtaaagtcctgtacacgtccggttccatcactgactctgtcaagtacttcatcgtgtatcacaaccacttcaccatctttcgtcagatgcacatccagttcgatcccatctgctttcatctcaatggcttttcgaaatgcatccattgtattttccggtgcatatccacttgctccacggtgcgcccatacttttattttttttgaatccataaatttttatcccccttctgttttgacacattctaatcctgaatttgtaatacttccatatgcttacatttcttccacatagtgcacatagtcaaaatttctgatctcatcgatcagttccggtctcatattatagtgattgacttccagagttaccactaaagatgaaaatttacccggcagtttatttttggttgtctcaaccgtctctgttttcacattccggcttcgcatctcctgtaaaaacagcccaatgctctttccattttccagttcaagataaaggtcaaatactttcgcatgtttctgtaaaaaaatgtcgattttattcagaaggcgcaatacaacaacaatgaataccagcgtatagactgcaccttccacaaatccgattccgattgccagacccacacaggcacatgcccaaagtcctgctgctgtggtaagcccccggactctttgtttctccgttaccaatattgtgcctacccccaggaatcctaccccactgatcacctgtgcaccgagccgtgcaagatcggctttctggtcaaaattcatcgacatatattcactggtcagcattaccaaagcggatccaaggcacactaatgcatgtgtcttgatcccggctccgcgccgttttaacccacggtcaattcctatcacagttcccgttaggattgccagcgcaaggcgtccgcaaatcgctacgctgttccattctgccattgcgtcaataaaagctctccacatgatttcaccttcccactattttatctccaacgaatctttttgtgcatcttaggataaagaaaaagagcaatttaaaattatctttcaaattgctcttctccccattctcacctgcaattactttgaatataaccgaatccttttttctttaatttttccgtaaaatctgtagtaaaatgcatgcaaaaaacattccttcttaaatccgccggtatacattcctccagctcctctaatgggcaatgtgacctgtgatccgatgtaaattctgttgtatcctgatagatcgttgatatttcccttttataaaatctgtttaatacatctttgggaatctcatacgaatctccactgtagtaaatcttctctcctgcaaattcaatgatataaccaaagcaggaaatatcatccgcatgtttcacagaaacagcccaaaccttcagtccctctgcggtaaacagactgctctccacaggaatatagatatccgggtcgattcccatcaatccaagcagaatccacaaagacttttccggatagatgaccgtcacttttttcccaagtacataataacaataggaaatgatagacggaagacttcccacgtgatctgcatgcatatgtgttaccataattgtgataccggcgtatttctttaagagttctttctgatacaatttcaaaaatacactctcccccccatcgatcacatatagctgatccttgtttgtaaaataggcacttgtattcccgtacaacggattaaatgccgaaccacatcctaaaaaatttaaatccatacgcatcacttccgataattattttctttcaggtaatccacacaatgctttgtccagtctgtctggataatgtcaaatcctttatctgcaagccatccccatcctttcgcaggatcatcggtcagcgaaacgtcatcggtatgccctgctgccagtggaacccggctggaatataaaatcgcattgccccagagaatccgcccctttttcttctgcatttccagataagattcctggatcaccggagatgtttctttttcaaacacaatctctgcccctatataattgatgttcattttttcaattttatcagaggcaagatcctcttccatgaaaattggcatataatcgatcgttggtgcataagcttcaattaatttcaaagattggtcagaaggatcactcttcattaaaatctgatcttccattccatgtttctttactgctttcataaccggttcaataatattgatgcttctgtcaagattcagtttacattttcctttcaaatgctctaacacatcatcaaatgaatttaccggcagaaatgtctgctgcagatcgctgttacagagtctcatctgtctgatctccccggctgtataccgttcaatcctgatatgtctgtcaagatggctcggttccattcctgtgtggaatacaaacaattcgccatcgatactttgaaacagatccatctctaaaatgtctgcgccctccttgagtgcaatatcaaaagccgcaatcgagtttggcggaatatttcccccactggttcctctgtgggcggcaaccagaacacctgttttttttcttaattcaatgatcgattccatttaatttttacccccgtttttcttttttgtaaaaaaagattttatctttccaagtccgtcatatctgccaagccaaagtgcaatcgtagaaatgatcataagcactaccgtataaacaaatgccattgcctgtgcatctatggtcgctgtctcatccgttgccagcttgatcacaattccaagcggctgataggatggatgatataaaaatacggataagtcatattctgataaaagtccgttaaagttcaatacaatgacagataatacgattggcataataatcggaagaatgactttcctcattgtatagagcggttttgcgcccataacctgtgctgcctcttccatatttccatcaagtccgacaaatccggcgcggatcattcggtatgaaaacggaattttaataataatgtatgcaaacagcaggatgatcggtgtagcaaccaataccttatctgccaggagcattcttggctcatcgtaggtcagcatcaaaccaagtgctatcatggttgatggcagcagccatgggatcagaataaacggttcaaacaacttgtcatatttgtgttttgcttttgtcacaatacgggcaaccacaatacagatcacagctacaaccagtgccgccagcagagaatacacaatacttaccagatacggcttatatgcagtggctgaacggaacagttttttgtaattctccagtgtaaaagaatcttttctgatcacacctgtcttgatcgtcaatccatctgtaaatgaaaatacaagtacgttgatgatcggcagcatgtaaatgataaacatcacataagctacaatatgtgcgatcacattcatgaccggattttcaatcttttgtttttccattttggcttttgtctttgaaaccgatataaaattgccttttttttcaattttctgcatgattgcaagaagaatcgtcgttgcaattccaaggatgattgccagcagcgctgcgatatctctcgatcccgtcatattggcaaacgtcttgatcatcgggttgattgtctggaaatccgggccaccaacgatcaaaggtcctgacattgtgcttaatgctgcgataaaagtaagcactgtaatcgcaaaaatggtaggtttcattgtcggcagcacaattttaaataaaatcgtactctgggatgcccccatattcttcgccgcctctatcgtatgataatccagccctcgtatcgcatttgtcaaaaacatcatatgatttgatgttcccgagaatgtcataataaaaagtacagcaccaaatccgacaaaccagttcggatccagacctggaaaaatattggtcagcacttttgtcacgattcctgttgaaccgtaaacgaacttatatcctgtaaccaaaacaacgccgctgtagatcagtgttgacataaatccaagacttaatatttttgcccctttgatgtcaaagtattctgtaaacagtacaactaaaataccggatatatttacggtaataatagaagcgatcgccagaacaaagctgttctttaaactcttcatggcccttgctgatttcatgatcttgtcaattgcttccaatgtgaaatgtccgtcttttacaaataccctggcaagcagatttaagtttgggaataccagaaatgtaatgataaaccagattaatgcaattttaataataatgccgggaatattgattgttccatcctgaattttttgcttgagtttattcataaaatatccctcctaaaactgcatgatatcctgtgggttgatatagaggtctatctgttcgttttcctgatacagcctgcgtccatcatttttttcaagatatttaagctcctgtccatgacattccagcacatactttgtcagcacaccactaaattcagcttcttccactttgcctgtgagtttcacataaccggctttttcttcactgatacatctctcaattcttacaaatccagtcttgtttgtatctaaatttgcacccgactgcgtattgacctcagataaaagttcaccctttaagcggttgatatcaccgataaaatcgcagacaaactcactttttgattcattatagatctcatacggcgttccaacctgttctacatatccattgttaaatacggcgatccggtcggaaagcgtcagcgcttcttcctggtcatgcgtaacatacaatgttgtgatacccagctctttctggagacgttttaattccattctcatatcaatgcggagttttgcatccagattggatagcggctcatccaggcaaagaatcttaggctccagaacgattgctcttgcaagcgctactctctgctgctgaccacctgacagatccgacacatttttctttaactgtgattccgtaatcttgatcttagctgcaacttcatgtactttctgatcgatctctgtcttcgatgctttttttactttcattccaaacgcaatgttgtcatagactgacattgtcgggaaaagcgcatagctttggaacaccatgccaatgtttcttttttcaaccggaagatttgtaacgtccttgtctcctacatatacttttccttttgacggtgagagaaagccaaccagcgcccgcagtgaggtggtctttccacaaccgcttggtcctaagaaggtgaagaactcaccttctttaatatccagattcaagttttcaatcgctacaaaatccccatactttatttcaatattttcaaactttaccatggtgttctcctaactttgtttaatgtcagcttcctgtatttttagtttcttctatatttactgtacatactcaagctctgctttctctacccatgcatccacattttctgcaatgaaactccagtcaagatcctgcggtttcaaagtctccattaactctttaatatcatcggaaacctggtctaatgcttctttctgacatggaatcgttccataattattagaccagtcaagctgaacatcagaacttccaagccagtttaaaaatgctacacaggtatcatatttcttagtgcctgctgaaattgcaagagattctaccacatatggctctccaatgtccggtgtcatgatctggaatttgtaatcacggtctttctgctctgtcaaaacgccggatgcccagtgctcatccatcggataggtaccatcgatcacacttccgactgcgtcttcaccatctgcaatgttatgtgcattacctaagaattttgctgcgatctcccatccctcatcagaaatgccaagatctccgtccggatcctgataacggctgatgatacttgcaaataccgtctttgctgttccaccgcctaaattatgtaactgatacagtcctttgtattcatctttcgtcagatctgtccagtcagaaggcatattgtcatagtccgcatttcccattaataccaatggcgttgttgtaaccgggtaataatatccgtccggatcgatgaggtctgcatctactccgtccacccagtccggttcccatttctgaagcaaaccgtttgcttttaatttttcgtactcaatattgttcaatccaaatgtaacgtcacaaagaggattatttttctctgcgatcatacgctcggttacctcggatgctcctaatgctaccacctcaatatcgaatccggcttctttcgctttctcgatcagatatgcatcacgaccttcggttccgctgttcgtgtatacaacaagtttttcattggaagatgaagtatcctctttctgggtatctgccgcatcggtcttgtcctccacagctgtgcccatctgatctgctgccgtgctgccattgtctgcgctggtatttccaccgccacagcctgctaatgctgcaacccccattgctgatacaagtaatactgataaaaatctttttttcattgtaaattcctccctctcttttgtttttgtaatgttatcatacttcatattttgaaacgtgtcaatattattttgttcgatttaacaatttattttgtattttttgatattttattgtactttttacatgtttgtttttgcatgctttttattcgtcattatacattttatccattatcccactgtattttattagttttttgtatttttctcatatatccgccggcattttatatcatagtttgttttttgcaatacttctatcaagtttgtgtaaaatccatgtaatttttataacgttataattttcctatgactattgacacataaaataatagaatgcatactccgcggatattctattatcacaaacaaaaaaggtggaacatatccaacatatgattccaccttccgattccattttcgctttacagctcccgtattttatttgttaatttcttcatcaatcagtttctgtgcacggtttagagattcctctaccggcaagaatcccatcagtacattctccacagccattcccacaatattcaaaaacttgatttcatcaaatgctttgtctgaatccgcaggaattctcctcgtatgtgatttgctgaaacagtcttttgataattccagccagggaaacacatctatgatatcgtatttattatatgttttcgcacatggagaaacgctcccaagtgctgccatgccagacgccgccggctctgttgtgatccatttgataaatgcaaatgcatcttcttttctgcggctgtttttggaaattccaactgttcctcctccataaatcggattttttccaggaaccattgccactcctatatttccaacaacttttgagcctgctcctaagatttccgatgcataattactgaaattgatcatcattacaagtttgccatccgcaaagtcttttgcagatgttttccaccagtggaccacctttttatctgtatattgcttggcagtcagaagttcttctaatgcctttacgcccgctgtatcattgatcacgaccattccatcttttccatacagatgatttttatggctgaacagccttgtaagaaattccgtcgctgtgacacccaggtttccaagtgtcagatttgaaaaataatgttcctccagcctgtcacttgttgcaaaaaactccgcaattttattgtattcttcaaatgtcttcggaatttttaattccgctttatatttctcactgtacagtctcttaataactgtattttcaaacagatcctttctataaaaaagaagctgtgtactcggtgtgatcggaagcgcatacgccttgccatgcacacgggaatacttatctatcaatgccggtatgtactctttatacacttcatcaatatccggcgtcatatcgtcaagcgggactaatatccgttctgaaagcaatggcagccaggttacatccattcggaatatatcgtaataatccgaattttcagctttcataaactgctcataaatatcatcataagaaaatacatcaaactgtatctgtgttccggtctcctctgtatacagttttgccagtccctgcaggatcattgtctccgggctgtcaagggtcagtatccgtaaatgatccgccggtgttttgtttaaagtgatctgattccactcacgaaatccatcattctcacagatcagttccttctctgccccattttcctttgaatctccgataattttttccgcagccattttcccgaccagaccatagtttaactcatatttgcggtaatccttttccgggagagaagtgatcggcgacaatgtaaaaatcggtgtctgattgcctgctgaaaagtttgtaacaacatttcttatcttttctgcaaaacggatattcgtcgttatgattgcatcgtattcattttcctgcacaagagtattgatgattgcatgggatacacgcctgctgtctgtcgtgatatggaaaaattttattttctcctgcgcaagcatcttgtagagacctctgcagaactcattttcattggaaaattttaaagaatctgttaccacaagaacattatgatatctggctgatatgacagtttctgcaatctgccctcccgctgattcataatcaaatccaatatagtccagatcatcggtcgctttccgctccacaaagcacaacttttcaaatcctgcatatgcctctttgacttccttttctcccagacaggtgatcgacgccacccccatcgccattacagactttgcccattggatcatactgtattctgtttgtctgttatcgtttgtgatcagaagttccgctgtgtatcctctcttttcggcataacttttcaggcagtaataaaaatccctgtaatgtctgcgttccattgaaggcacgatcacacagataatattaccgcttcccttcctgagcatcttagcccgctcattgatcgtatatccaagctttttagcagcttcttccaccgcctttatcttctcactgctgacatttccttttccgttcaatacattggatgccgttccctgtgatacgccggccatcctcgcaacatctataatggtagccatgtatttctcctttttatgcgccgcttttccttataacgttattataagtattatactatagatgttgtgggtttttctacaaaaaaattacctgtctgattcactcttatatcacgatcccattacagtgatcgacctcaatttcttcataccttgtacatgacctaacgccatccaatgacagacagccttcctctgtctcaaaagcaccagattttctggttatgaccgaattaatcattgcaaactgaaacggaccggcagccaccacaatgatgattttctttaccatataaatctaatttcctttcaacatattatgcttaaaaccgaacctccacatcgcagtttcctgcaggttttctgctgggcgcatttaaaatttatcgtagaggcttcgtttatttcatgcatagatgcaaccatctcctgcatctttccattgctttcccaaattgcacctccaagctcatccactcttccgctgattttcttggcactctctgaattctgctccacctgttctgaaactcccgcaactgtcgctgtcagtttctctacaaccgcagcctgattggctgcaccgtctgcaaggtcatttgagcttgcagctacctgctctgccgcacttgaaacctcccttgatacattctggattccctttatggtgactgccatacttttttcaaattccataaatgaatgtaaaatacctacaaaatcgcctttccactctacttccggctgtgcatcaaaatgtccgtccgcaaatttatagacattttcttatcg

SEQ ID NO: 5195 - DNA, 10567 bp, Unknown
  gut microbiota DNA sequence
cgtacaccggttggattctctgcggaaaatgcaaacgttttggagttctggatcatacaatagttgttcatattcttctcctctctgatcaaacctggatcatctgaaattattgcttactacgctatcgcgtttctctattcactataaattcactataacatttatctcccatgaagtgacggaattacagaatcattccgtctgcgccttctcattttcttcccggataatctcctttaattcttttcgcatcacatccagtggagccttctgtccggtccataattcgatctgagcagccctctggaactggacataccaagaccattcaggattttgcagcccttcttctcagcatttttcaggaatgcggtcttggacgggttgtagcaggcatcaaaataaaactgtcctggcctgattagttcaaatctttgtatatgggtttttgtattgcccgtggttttgtgttctgtcaccgtattgaaggtttttcgtctttctcatacggtcatagaaataatcaacgacaagcctgacaaaatacggcatattccgctgcatccgatctccattttttctctcgacgatttcttcgacaacttttttcagcggcttcttcgcataatcatttcgtgccgatactttttcgtgattgctcaggtcaaaagtcggtgtccatgtatccggcagtttataaaccgagcccattgtatagacaccgctgcctttttcggctttcttaagtgactcccttttgatctttttcatatcaaggaatggcaacccggatgatgcgtctgctcgacaatctccaatacaaggccgccatcaatcggcatattcatcatgacgcatataaggtgctggcggttctcatccccgatagcgttcagcagcttccggcattgtttaaattccgcctccagtttatgaacctcttcgcaaaacagattcatggtataaccatctcctttattcaagcgcttaaactgattataccataaatctatgaacaaagtttatctgtaaagaaaattgatacagagtttttcaaaatcggtccatctgctcctgggtagccacctgcctacaacttgtattgctatttcctatcgttccgaacaatgcaaccattgtccggcagctgtttcaggtaccaacaattcatacgcaatatattcataaatgtccctcaaatcctgtcttgcttcagcggaatatgccacataaaaaatcatatgccaaaatcccttttcatttcagcttcaatggcatctgatgagtaaactctgccagcttttacatcagacatacctttttcaatttctttatcaaattgttctttcgtaagagaaccataggtcaacggtgccgttcttggtaatttcatttcaaatggaattcccttttgcaaaacaatctgccgtagaaacattcctactgcatttgacattggaattcctaactgatctaatacactttcagcctgttctttaagttcaggctcaactcgagcaaacacatttgctgttcttgccataatcatcgcctccttcaactgtattctaccacatgcattttctcttcctgctcattctctacaggttgcattttggtcacttcactatgctctgaaacacccattatatcttcaatctctgcctctatctctttaatatctatctgaagatttgttatgtactgtcctgcatttctataaaactccgcctgttgttttgcaaatgaaacccagtcattctcttttccatcaaatggagtatagtttctttcttgtaccattgtttcttcaccacctttatcgttaaatgtcggttcaatgctatatctttgctttgtattttggctattataaaccgtttcatatatatcttctctttgcaatcgtctgtctttaagtacacagttttcaaacaactcttcatactttctaggtttgtattttcttgtttccaaacctttgatacattttaatgcctgttttgccttagcagcattcgcattagttccgaggttgttttgaaagtattcaattctttgcagttcatctttgatgtctcttctattttccctgcatacccttaacagttcaaccagatccgcagcctcattatcatcggtttcacataattcaatataatgaagaatatcgcaaatcttctgatctatatctgaatgtttttttgacaactcgtttctatagtccttcagaccttctacaagatatgtaaaatgtgtaagatattctgcccagtccatttctgacaattcatacgatgcaacattcttttcaatcggctctgttacctcatcgtatgtgagttcctttattggcgaaacaaattcatccttaatattttcttcctgttcttcaatctgttcccataggcacctcctattctaatgttccatcacttttacacacttcgtttatttcaaaaaaataagaaccagtaagagtttatctcttatctgattcctattataaagacctgggtgtcccataaacacaccttgcatatcgaatttttgttctcactttttatattgttttatcaatctgtcaatttcaatgttcatcatttcgacaacattatccggtccaacaagtgttacgccttcaccaagactaataatccatgctaaaaactgtctgctgactgcgacttccacattgacaacaaagcgtttatcatccagcctgatcatagatacatttttaccaaaacgatctatcattacacctgcaaaagagttatcacactcaatacgcacccattcctcttttcctccatacattccaaacatttttctggcatatgcagccatatcaaatgatttaaaaacctgtcgtccttctcttcctttcccatttgatttaatataaagcattttatctacacgaaaatgtttaattatcccctcagaactatcatatgctatgagataataattctcatcatcccatgataaagaccagggactgacctcataaagtgatccaccgtgccgaagctccatttttttatcaacgttccactggaagtactggaatgttatccttgaattctctgctattgctgtatgtatccggtcaacattgtaataaatgctttcattcattgtctttacacgaccagccacaaacacctgcctatgcaactgagatgcttcgtatttgcttgcaagtccctctatcttttttataagttcatttgacttttagccgtgataaattttgcagactgtacagagtcaaccagtaattttaattctgccaattcaaattgcctgtttcctatatgatatgaataagtcctatcctcctgcgttccgataacatccaaaccatatactccgagattttcaatgtcattgtataagctcttacgttcagcacttatatcgtatgctgcaagtgcatcaataatctctgacatagtaatactgtgcgtttcatctgttctctccaaaaggattttcataagatatataagtttcaatttctgatttgacgatttaggcatatcgcacctccaaactacctttccccctcattcgcatcttccatctcaacctgttcctcaccagccccatcttcaaacctcacacggatcactgcctgtggccagttgaccgatacatacgcctgttttccttttacactggcctcctcatcaaataccacaagtaattcttttaggacttcttttgtcagatagcctccacgccaatggaaaagtaaaatccggttcttcttaacggcctgctttgtacggttacgcacctcatcaacagttgtccacgataattttttctcgcgataataaaaatgatcactgtctgtgcactccggcactttccatatcaccggctcatggtccctaaaaatctgtttatccgccagatttacataatcataacggacagcatcatcccgtgataatgtgttatcaaatgtcacatcaagatgataatattttccgtcgatacgaatcacattccatgcatgacgatatttaattcccttatcggggtttgcatctgaaagagcaacaatacaccagataccaagttcatcgcaaagtattttcacagcttttgccatgccttcacatactgcaacgccattgccaagagcacctatgatttcgtgggagtattcctttttaagcttgtcgtacttcacatttttgacgataaaatcatgtatgaaaagttctttctctttttcactcagtttctcagccaaaagcgcaagctttttgacgcgggacttcattgccaggcgatgttcttttatcttatcccttgtaaaaagatactccggtatgagttcaaccattgtagaatcaggataatatctgtatgtaaatttgacagaatagaatatttccgggcaatccatacgaaccataaaatatatatccgccagctcacggctgcttagtttaagcacctgaaacgactcctccattttgagaagtccctccttcacggcgtaataaacttttttctgttctttatttaattgatgatagtaataatcttttgcggttaaagtcatgatgttctccagctctattggtattaccggcggctattttacataataaacatagttttcttttctcggtgccggcgcattggcaggtgcggctgcatatccgattgcgcaatgtccaattccttcataattgccttcaatgccaagatctgcaagaatcttttttccaaagtccgactcgaactcttcttttgccctgtgaatccaaatgctgccaagacccaggctttccgccgcattcataagatttcccatgacaagggaaccgtcatactgataggttggtatgtctttgtctgcaagaacaatcagaattacaggcgctccataaaatggatctgtcgcagtccccataatctttgcattttctgcagataaccggtctcttaattctttgttcgtcacggcaataatgatcgggctctgtcttcccataccggttgccgcataggtaccagcctttacgacagcctggatatcttcttctgataccattctttccttgtcaaagtttctgcagcttcttcttgtttccaatacttttaatgtttcgttcattgtgttatcctccatttctattgatcggctcagatatctgattttcccgccctttaccactcctgaaatccacacagcttcgccgactcatacactggttttaatatattgcccagcctctccggaaactgcccatcgtctaacccttctgcataaagactgtttcggacatccatattattgatatgatattttgcacattcctcaaactttgcttttgcaaccgggttatcgtcacagatacgataagctttgtattctaacagcgccaatggttcataatactcttcccacctaggaagtttgttccccttactgctgttaatcgttttcgtcgtcggactgagattccaaagttcatcatgtgctacaaactgccatgggacaaaatgatcaatagatattttttcttttgacaaatttatctttccgtaaatatctctgatcgatggatctaactctatgagtaagttccagtagtccgtcactttcgttaaatttcgtttcttcggttttgccaatttatctgcaatacccggcacgctaggattccgatcctgcaaatatccgatcagattataattgacccagtcttttagaatctctttatttcggatcagatactctgcccattcatcatttacttccacccttgtatccagcttttgaaaatccataaaataataaagcaggtgcttctgcctgttaatttccgcaattttgcttttgcccggagatttaattgccgggtaaaacggactctgcaggcaatacggaacatttacgatgagtttttctttatatttatcgatcctcacattttctgttgttcttaaaaattcatggagttttccttcctccacggtagaggccagcttatattccgtggaaatatatcttactacttcttccaggttgtctgtcgtattgcagggaccaagcttaagattaaattctgtcaccatataccatgcgtggacgatcatttcatctaacaattcattataagtaaatgatgttttttccacagaaattttatttaaaattgcaagcatccaaaaatatttataacagttagatactctgttacggtcaaacagccggctcagatagccaatatttaaattgtcactatacggcagattcatacgacagtctccttaccctttttatcatttttccccatgacttagatcataccatcccctttaagaatgttgtatcatctcatctccaaccttctcaatcagcgttacatccgccggcagccactccacctcgcctaattgttcacgcgtcagccaccttgccgcctcatgttccttcagtacaagctcaccttttacaatttcacaccagaagcaatccatggacagatgaaacgtaggataatcatattcgatcgtatctatgagttttcccactttaatttctgtatcgagttcttccataatctctctttttaaggcttcttttggagtttccccttcttcaattttaccacccggaaattcccagccgccttttaaatcgccatagcctctttgcgtagcaaagatcattggcttaccttgttcatttgctgcttttataactgccgcaaccactctgattaccttcatacaacctccacaagtattctattatggcaatttacgcattgacaatgtattcataaatatcttcccgaaccggcacatcgaggatccactctatctcaacggctgttttctctgtatttgccatcgtaaactcttttgcatttccactggctgtcatgtgaccaagataataaaactctttggaaatcttatcatccttattttttcggacaaacaattccacctggattcctctttcttttgccttgagaaaattctgtacatcttccgactgcatacttcttcccgatttggaaatcgcgatcaaacggtcccgaaagcccggaacaaaatggtcttcgtaccttgtggtatcgctgatattctccgctttatcgtaattgataaacaccggaaaagtctttgtttttttatcaaacttataaccaccaatatttaatggcacctcattttgcttccagttaagaagacggcacacatcttcatatgtatatttctgatataacaccagatctgtctgcccataagtcttactgtaatctctcttgtaacggctgattccaaaatccacaagctcttttaaaatattgtaaaaatcattgttggcaagcatctcggcaaaagatttggctggtttataatccgaatcatctttctcgataaaaacacactgcgcatacgttttctttcccgatcctgccggaaactcatttgtcataacatgaataatgttctcctgctgatctttactcatcacttttccatatgatttcagatcattctctaaccctgcaaacaaaccaatctttgaaatgccccgcgtatatactaagattctttttagcagctgtaactcctgaattcttttaccacttgctaacttctttgaaacaaactcaatgactttttcttcatcttccgataaacgaatggtatattccttttcatatttcacaagaaatttgtaataagaaccaagactgttattatcaaaaatgcgaatgacatccatctctccataatcatcaaaatcacggagtgccggaattcttccaagtttatttttcaggttgttataattttctttgataagcttaatatcactaaaatttgcattgtcaacagacgcaaatattcttttcctgcttatttcatcaaaatgaacggtggatgctccgggaattacccttccgccttccataacatatctccggatattatccttgttataagtgcggtctccggataacgcaatcggaatcataaaattattgttataatttccaatgaaatccaatataaccacatactcttttccactggcttttctaagtccgcgtccaagctgctggataaatacaatcggggactgcgttggtcttagcatgatcacctgatttacctcaacgatatccacaccctcatttaaaatttcaaccgaaaaaatatagtctaatggctgtctatcttctgaactctcgtcctcattcattgccagccgctcaaacgcatcctgtctttcctgttccgatgcgctgccatttaaagcaacggttctgaaatttttaccggtcgccggattaatgatctgattgaactttgcggacagttcctctgtttcctttatattgctgcagaaaatcagtcccttcactttatcgccgctgtacccataataatctgcctgattcacaatatgtctcacacgctcatcacttgtaagcatgttaaaatctctggctgcttcctcatctccaatcatagacaaatccgtaatcccaaaataatggaacgggcagagaagattctcttccatcgcctgctgcagtcgtatctcgtatgcgatctgataattgaaaatctcataaacatttctgccttccacgttatcatcacgtttgtccggcgtagcggtcattccaagccataactttggtgtaaaatgatccatgattttccggtaggtatctgctgggacatgatgtgcctcatccaaaacaatacagtcaaatgcgtctttcgcatattgaagcagatgttcatctcgattcaatgtctgaactgtcgcaaacacataatctgcttcatattcatgataaccggcaccaaccagtcccatagatacggtatttgcaaatactttctcgtaagattttcttgtctgtctggcaagctggcctctgtggactaaaaagagaactctccgaaagccaagctcacgcattgcaaatgcagaggcatatgtttttcctgttccccttcgtgtcaagggtgtgatgggaagtttttgagaaaatttcgttttctcaaatggcatctttaccaatagcaatatttaattgtaaaggcgaggtgcaggagtcgaacctgcgtcctttaccaaaactggtactgcgcctctccgctgcgctatcctcgcttaaagcggtggcgggttatgactcccgctttacaatcacctgagttacaccgctatactattttaaatgaacttatcaatatacgatatcaacatattccaatcagcaacattaacgtccaaatctgatatatctgttattacttttgaattattatcatccaaattgcctactctatctactaccatttttccttcatttctcactaaatcaattggatcacaactttcgctttcacaaagaaactctctaatagactcaaaataataattatctgcatccttttgtatgtttctaaaagcatttatagacacatcggaatccaaagcattatgtatcatttcatgcatttctctattttttataatagcattatataactgatctctatgattattcaatgcctcagcagttggaacataacttggatttcctttcttacctgcatttttgttataacattcgtcaatattatcaaacccacatagctcttgtattaaaatatactctttgatttcattcctcaactcatcatatttcttatctttcatgccggctatatcaaagaaatgccatcttcttaaatttgtcaatatagacctgccatttttccaaagagatggaactatttctaaatacaatgaatttttatagtattttccacaatcgccttttagactaccatttaacatttcattgctattcggttctttaatttcgaaagtcaatcttacttgtagcaactcttgtattttcggatttctatttttataaaaaaaatcctttgcgattaacatatctggtactgcctttgtaagaacagaatatttccttctatcatgttctattgtattaaattgacgaaaatttttactatctacaatatcatattcattcattattttattagcaagaatgctatctattaatggatatactattaagtcttgaaaagaatcttctcgaggactcatttcaagcaaatcaatgtatttttcttcaaaccatgtcaaagaataatttctatttaataaattttcattcaaattatttatcacccttttctctctgtatatttcaacaattatttttatctgtttgctacatttcttacccaaaagtgattatcaacctttcccttggaaataatatattctatctgcttaccttttttatttgacactctgcttactattgcaactttatttttatacacttcattatccatagcctctgacagtcgttttaaaatcaatttttcacattcctcatttatattaattagcttgattaacgatatatatgcataaaatcttacctcactgttctcattccggctgaattccaaaagggactgtaacatatatttactattt

SEQ ID NO: 5196 - DNA, 507 bp, Unknown
  gut microbiota DNA sequence
atcgagtaggagggaaatctgagtgatttcccgacctctcacaccaccgtgcgtaccgttcggtacacggcggttcaatcaacttaacaagtaacacacctttcggtgtagtaatctaacattgagactaatccaaatgaagttagtctctttgtgcttatagccttttgtatccatccattgtgacacatgtgtgcataccgattgccagtatttgccactttatgtgccgcccatcttggaacgccgagtttaaccaaattcttctctttgttttgtggtgttttccaatgtttccaaatacacatgcgtattctatatctaatgtttccatcaagttctctacagagagttttcatactacctatcttaaagtagttaatccatcctctgataagctgattaagtctctccactttatagctgttgctaacgccccagctacgacaagtgagttccctcatcctcttcttatacttcattactgattttgcatgtggtttcgcc

SEQ ID NO: 5197 - DNA, 899 bp, Unknown
  gut microbiota DNA sequence
tttgctttttccgtattttttatctccatcttcctgttcgatttcaaagtagtagtttgtgcaatcataataaaggatccgatccattctgtcaccaagaaaaaagctgtttttataaacttctgattgaataaaatccatttcagaagcaagaacagaaagagctcggtaaacatcatgaagttcataagttggaggctcaaggaactgttttgctgctcgaaaggaagaacttttgctggaaggttccagaacccttgtataaattaaatcagataaaatagcattaagatcatactcgaatttatgtcggcttttgatttttcggcagacagaatcgagcttaagtccatagtaaatagactgaagaaaaagatatccgccagaaaaaagtttctgcttattatagtccatgagtctgttggaatgaaatggaatcatgacagtagcatcctctttttcacttttatatttcagtgtttcaagacgagcctgttcatttgcccattcaacaactccgtcacgatccgtgtggagctgcgccgataattcagctaacgtacctaattttcggatggttttggaagtacttttcccattggcatttgtataggactgagtgatgtaaaaggactcagaattttttgattttgatgttgttatacgcacaataatcacctctgtcactattataccacatatcaccaaatattactatataataaaaataaaaatttgacaaaaaaataagcctatttcaaggctttgtggtacttttttggatttcaatgtgtcaaactcccgaaaaaaattgtgaagaatttaaaaataaaggtaaaaaaaagggtaaatcatgtatttttgcacaagtataaatatgcattttttacaaaagagaa

SEQ ID NO: 5198 - DNA, 7987 bp, Unknown
  gut microbiota DNA sequence
aggggaacagacgcatcttctgatcttagagagcatccaggatccgggaaatctcggcacgatggtgcgtaccggtgagggggcaggcatcacaggggtgatcatgaaccagacgactgtggatctgtttaatccgaaaaccatccgttccacgatgggaagcatttaccgggttccttttttcatcacgaaagatcttgcggggacgatttcatcactcaaagagcagcaggtcaatgtctatgcggcgcaccttaagggtatgctttcctatgatgagccggactataagaaaaagacggcgtttctcatcggaaatgagggaaacggattgtcggatgagatcgcagatttagcagatacttatattaagattccaatgcagggacaggtggaatccttaaatgcggcaatctctgcatcacttctgatgtatgagacgggacggcagagaagacactgattaacgataaaaatggagagataacaattcatgagaatctggtttaaaatgatgaagggtacccacctgatcaaagacatgacagtgacagacgagtcagatgatacgagaacacacaaaattttcaaggcgttagatgaggtatgttatgcatttgaccttggaaaaccgatctggttagatgcgaatgtggaagagtttaagaggcatgcaaagacacgttttacgcaggattgttttattgagcatgtggattttgattttctggagatgcatgtgatcgaggaggattaaagggagaacatcccaatatggaggacatgttgtatggcgctggaaaataagcttggaattaaaagttccgcagaactcgcgcgtgaagaggaacgtatcagtaaaaagaaggcagtagaactgtttgaaaatggtatgctcgagaaacttgaggtgggaaagtttcaaacgttatgtgagattcataaatatttatttgatgatatctatgactttgcaggaaaaatccgaaccgtaaatttatcaaaaggtaatttcagatttgcaccgcttatgtatcttgaaacagcaattaaaaatgtagacaaaatgccacagaacacatttgatgagattgttgaaaaatatgtggaaatgaacattgtgcatccgttccgtgaaggaaatggaagaagcatgcgcatctggctggatatgatgttaaaaaaacagatcggacaggtagtagactggagtaagatagaaaaagaagattatctgatggcgatggaacgcagtccgatcaaagatattgaaattaaatatattttaaatgcagcacttaccgatcagatcaatgaccgggaaatttatatgaaaggtattgaccatagttattattatgagggatatgtcacgtataagacggaagagttgtagggtggctggcttatgaaaaggcaagggagagatctcttgccttttggttatttatgtcagattatgaaatagaaaaataaatattttacgttaatatatgaaaacttggaagatgcatgttacaatagtaagtaaataaaatataaaggcataaaataacagatggagaaggggaatgttagcaaaattagaattaaaattaaaatgtgaaaaagaattgacataccagatgtcatcattgtttcatggggcacttatggaattgctgccggagaaatatgcagattatctgcatatttcaagccttcatccatatgcacagcatttagaatgcagagaggggaactggtactgggtaattacaggactgaataaagaagcagtgaagattattatacaggatacgttgtggaaattagaatacattctgataaaaaaacatgatcttaaagttttgatagtgaagaaaaattatatggaaacaacatataaagaattaatggatcatttttatgaggatgatgggaaaaggtatattcagattcattttctatctccgactgcatttaaacaaaatggaaggtatcttttttatccggatcttcgctgtgtttttcagagtctgatgaataagtacgacagtgccacagcagaaaatacaatgcatgatgaagatacactcgaacagatatgtgagcatgcacaggtgatcaggtatgatctgaaaagtgtaagtttttctttggagggtgtcaggattccatcctttatcggaaaaataaccataaagctgcatggcacagatacaatggcaaattttgtaaacatgctgttcgagtttggagagtattccggggtaggaatcaaaacttccctcggaatgggatatatgaaaatcataaacgaagggggaagaaaatgataacggacgatcagataaaattaatgattggaagtctgcttcatgacataggaaaagttgtgtatagaagtggggatggaagaaatcacagtcagagtggatatgagtatctgaagaatgaagcacatatttcagatgatgaaattttaaactgtgtgagatatcatcatggaatgtatttaaagaacgcatccttagcagaagacgataaggcatatgttgtttactatgcagacaatgtggcagcattttcggatcgcagagaggcggaagcaggagaaggcggatttgataaagcgatgccgttagagagtgtatttaatattttaaatggaaatcacggacaaagtcattatgccatgcaggttttaaatccgaagaatggaattaattatccgacagaagatgaaatatctatggatgaacatttttatcagtccgtcattcaaaatattacagataatttaaagggcatcacgttagacgaagaatacatcaattccctgctggctgtgcttgaggcaaatctgacatacattccatcttctacttcaaaaaaggagcttgcagatatttctttgtatgaccacatgaagatgaccgcagcagttgcgtcatgcgtaatgcagtttctgactgcgaaaggcgaaaaaaattataagcagagcctgtttatcaatgcagagaaatcttatgacgaggaaatgtttttactgtattccatggatatttccggtattcagagttttatctatacgataggagaaaaaggtgcattaaaaggactgcgtgcgagaagtttttaccttgaaattatgatggagcatattgtggatgaactgttagagaagttgtcactttcaagggcaaatttaatttatacaggaggaggacactgctatttgcttttagcgaatacggatgatacccatgatattttagagcactatgaaaaaagtctgaatcactggatgatggaacattttgatacagcgttatatgttgcctgcggatatgcgaaagcaaatgccaatgcgttaagaaatatgccgaagggaagttattctgatctgtatcttacgatatctaagatgatttctgagaaaaaatcgaatcggtataatgcagatataatccgtagtctgaatagcagaaaacatgaaggagagcgggaatgcaaagtgtgccgcagaatagcccgccttatagatgataaatgtccggtatgtctggcattagagaaaatgtcaggaagtattctgtatgaaaactattttactgtaatgagtgaaccggacaaagatgcgctgccacttccggaaaacaggtacttagtagcagatacaaaagagagcctgctaaaacggatggaatcagaaaattatgtccggtgttatacgaaaaatgaaatttataccgggaaacatgttactacaaaattatgggttggagattatacgacaggtgacacgtttgaaaaactggcaggacaggcaaaaggtgtggaaagaattggaatccttcgtgcggatgtggataaccttggaacgacttttgtttatggactgcagagaccggatggagatgacaaatatgtaacactttcgagaacatctacattgtcacggcagttgtctttattttttaaatgttatatcaatgagatacttcggaaaggaacagcagacaattttggtggaagtggggaacgaaaagcggtaattgtatattctggtggagatgatgtgtttttagccggagcgtggaatgatgtgatcgcagcttttatggatatcagaaatgcgcttgaaaaatttacacagggaacgctgacaatatcaggaggtgttggtatttacgatgcgaaatatccgctgaatgttatggcaaaagaagtggaaagacttgaagacagatcaaaacatgtggaaggaaaaaatgcagttacgctgtttgatgaaacacatgcttatccatggaatgtatttatacaaaatgttgttacagaaaagataggtgtgcttaagaattattttgatcagaatgatgagcacggtatgggatttttatatcatctcatggaattgttaagggaaagtgggaacaacatcaattttgcaagatatgtttatctgttgtcgagaatggaaccacaggaacatgaaaataaagaaaaacgggcggcttaccggagtttttcaagaaagatgtacgagtggagcgggaaggaacaggatagaaaagaactgatcacggcaatctatctgtatgtatatctgaatcgcaaaagagaggagcaggattaaatgaaattgacagaagaaaattatgtggggattgcagaacaggcaatcaaggaactgtgcagtgaaaaagaccagaaagggagactggttggtccggtaacaacatccaagatcagaaatctgcttgccatgacatccgatatttataatgatgtggtcaatagtcagagtgacaaactgaatgcggaaataattggacggatcaactatatgaagattcgttttatctatgaagcagggcgtgaaccgaaggtaaagaaactggtagataaagcaaaaattttagagcacttagaagagatcaaaggcagcagagaccagtatattttattcagccgatatatggaagccctggttgcatatagaaaattttatggtggacgtgatgagtagagggaggatgaaataatgtttgcaaaagttaaaatcagtggggtgttagagacaataacgggtttacatattggcggatcgagtgctttttctgcgattggtgcagtagattcccctgtcatccgggatgcaaggacgaatatgccgatgattccgggtagcagtttaaaaggaaaattaaggacacttctggcaaaaaaatataatcagacagtagcgaaaacaccggatgacgatgcggtatgtctgacaagtctgtttggaagtgcgaaaaaaggtcaggtaaagactagtaaaatcctgtttaacgatatgtttcttgaaaatatggatgaattaaaatatgcagggctgacaggtgcaacagaggttaaatttgaaaacagcatccaaagaacaacggcagtagcgaaccccagacagatcgaacgtgtggtaagaggcgcaaaatttccgatgcagttgatttatgaagtgacgaatgaatcggaaatggttcatgattttgaaatattaaaagacgggtttaaacttttagaatatgattatttaggcggcagtggatcaagaggttatggacgtgtcaaaatcatggatatccatgtggaacctgtgataggggaagtgtcggaagatgttttgtcccagtgtcagaaaatcatgagtgcagtggaataaaataactttgcaggattgatttttgactacagagagaaaagaaatgaggcgggacatggaatatacgatctatcagttagaatttaaaacgggtgttcattttggtaccggaatgttaaatgaaagtgcctgcacgtttaaggcagatcagatattttcagcactttatatagaggctttaaaactgaatctgcagcagcagttatatgatgctgtgaaaaaaggaaatctgttaatttcagatgcatttccatatattggacagcagtacatgattccaaaaccgatgatatatgtggagccgataaaccgcggggaatcgaagcagaaaaaagcatataaaaagatgaagttcattccggtagaatgtttaagtgattttttgagtggaaagatggatctgtctaatgatccgatggaacattatggacattattttcagcagacgatggcggctgtccgtaccggcgaggagactctcccgtacagggttggaactttttattatgaagagggatgtggtttgtatatcattgccgcgtatcagggcaaaaatgaaaaatgtcttatggaaaaactgctgacggcattatcttatacaggaattggcggaaaaaaatcaggtggacttggtaaatttcaatacgatgagaaacagattccagaaaaacttttagagagcctgcagaaaaaatcggacagatatatgttattgtcagttgcacttccggcggatgatgagttggaaaatgcgatggaaaatgcatcctatctgttagaaaaaagatccggatttgttgcgtcttcggattatgcagaggaatggagaaaaaagagggatctttatgtatttacagcaggttcctgttttgtaaattgttttggcggagatatctatgatgtgtcggaaggcggaaaacatcctgtataccgatatgcaaaaccgatttttatgggggtatcattatgagggattatttgaaacattaccgggtgaaaatatgtgtattatccccagtctatataggttccggtgaaaaaataggaaaaaaagagcatatctatatgccgtggaatcatcatgtgatcataccgaatgtggagaagatgtacatggatctgcagaaaaaaggacttggaaaagagtttgcagactatatgatggatgggcggccaaagggaccttctttatcccagtggcttggacagcataagatgcagcgggaagattatgaaaggtggaaattgtatgagatggatgcaggggaagcatttgtttcacagacagccagaccaaaagagatcgaagcctttgtgaaggatgcatatggtatgccgtatgttccgggcagtactttaaaaggcatgttccgcacggcactgattgcagatgagatacaaaaatgtccggaaaaatatgaaagaacaggcagggagatacagtctgcttccgcagaacgtgcaaacagaaaacaatgccttgcaagagaaacaaaacgtttagagcaacagatattttatacgttaaaccgtgatgaaaaaaagcctgcaaatgctgtgaatgataatctttccggtctgcatgtaggtgacagccagcccatcagtgtggatcagctgacattaagccagaagattgatgtcacgctagacggtacagaaaaaccatttaatgtattgagggagacattgatacccggaacagagatttgctttgatgtatcaattgacacgacaatctgtccatatgagatggaagatatcatagaagcactgaatattttccggaatatatgtaaccggtatttctatgagagatttcgccgggaggcaaaagaagaaaatactgtatggttaggtggaggctgtggtttcttctcaaagacagttttatatccattgcttggcagtaatgcagtaaaagtcgtggataatgtgtttaaaaatacactgggaaaaaattatattgtgcataaacataccaaagatctgcagcttaagctggcaccgcatgtctgtaagtgtacaaagtatcagggaaagctgtatcatatggggatgggaaaaattgaatttgaggaaatataacaattttgcgccgataggcttaaaatcaggctttgtgatcggtatgatccagtttgatattgagatttctctcatttgcgggtttgccccgcaaatgggggatgaaagccttgtgtttggagaggtgtaagggacaggattgaaatataagaaccccgtggaggggacgagaactagaaaatcccttaatgtagcaatcgttta

SEQ ID NO: 5199 - DNA, 14474 bp, Unknown
  gut microbiota DNA sequence
gtccttatgctggataaaaaagaagatggtatattggatatgacggaaggaactgttgttgaatcacatcagatggattttcgtcttgaagcagatttctgtaacatgaaggatgaagcacgctgctattaccgggtaaataagggagactggctacccatcggaaacgtgcataagctgtacttcaaactggatcattttactggttgccggtttggtctgttctgctatgcggcagaggaaacaggaggaagtgcctgcttccgggattttaagtattatgatgttgatgaaatctcataaagatagaactgcataaaataagtgtcggaatttactcaaatttttcctactttggacattggtttttacaacggtattgtatagtgaagcagaggaaaaacaaaacatgtttcaggagatcacccatgttaaaaaaaataacatatgtggtctctttttgttatatcttttgctggaaaatgatgtttcgtatgtttacaataaagtatgaaaagtatgaaatgtatgagaacacgagaggagatgggaggaaaaacatgctttcagataatatacagttacttagaaaacgggcaggaatgtcacaggagcagttagcggaactgacggaaacgagcagacagacggtctcaaaatgggaatctggggagagtattccggatgtgatcgcctgtgacaggatggcagaagcatttggtgtggcgttggaggatatgctgcattatgaggaaaaaaataaaagtcttccacttccgccaaaagggaagcatatgtttggaacggttacagtcggagcgagaggacagatcgttctgccaaagaaggcgagagaagtttttcagatcaaagcgggagatacgatcatggtgttaggtgatgaagcacaggggattgccctggtcaaagcagatgatatgatagattttgtgcagcaggcattaaaaatggcaaatcaaaaggataagaactaagacacaaaaaagtgaggaaaacactgcaggaggaaatggagatttttatgagaaaacattatctggataatatccggtttctgacgattttttttgttgtgatctttcatgtttatttttattacaataatattggaaccgaggcgatgtttgccggtttaaaaccgtatgaaggagcagttacatttgcggggatttaccagtattttgtatacccgtggtttatgttactgctgtttgtggtcgccggaatcagtgcaagatatgcactggaaaagagaacagaaagacagtttttgaaagagagggtggataagattctggcgccgtcgacacttggtgttctggcatttggctggctcggtggatatgtgatctatcttcacactgcgcgtggcaatatgccggagagtgtaccggcttttgtgagagtcattatcatcttatgctgtggtatcggggcactgtggttttgccatgtattgtttgtggcagcactatttctgcttctgatccggaaaattgcaggaaaatgcaacgctgcttatcacgttctaccggaacggcatttatattccggcatttttagccggatattacctgttttcgaatgaaagtgtcatggaaaaaataaaaaatgcagtgctcctattgggcatttgtgcagctgtaagcggcatattttatatcgtaagatgttatggaatggcatatacggacaaagatgtactgtcaagatgggatttaaacctgtatgcattttttatggttttgctcgtgcttggtgcaggtccaaaatggcttgatttttccaataattttacgaattatatgagaaaatgctgtttcggtatctatgtattacatatcccggtgcttttagtgatcaattatcttctggctggaaaggagctgccattgactgtagtctatggtattgaattggtgggtggatttgtggtttcaatcttattatatgaagtgatacgtcggatcccggtgcttagatactggattttggggattcggaaacaacggaataacgtttgaaaagcgagatataatggacttttttgataaaaatatcagctaaaatatgatttcacaaaaagttcacagaaaattagcactcacctcttgacagcgctaataagtggtggtataacatagtcagaacaaaggaagagggaacaaaaagagaagatgattccccagagttccttcgtctgaggttccaaaacaaaggtaaaaaacatgggaggttccacagaaagtggaccggtagaaaaaggagagatgacttatgttactgcctagcatttttggagaaaacttatttgatgactggatggatttctcattcccagagattccggatgttgataaaacattgtatggtaaacatgcaaagaacatgatgaagacagatgtaaaggagaccgagaaaggttacgaagtagccgttgatcttccaggatttaagaaagacgagatccagcttgagttaaacgatggttaccttacaatcagcgctgagaagggtctcgacaaggaagagaaggataagaaagacaaatacatcagacgtgaacgttacgccggaagtatgagccgtaccttctatgtaggcgagagtgttaccgaaaacgatatccacgcaaaatacgaaaatggtattttaacactggatgtcccgaaggaagaagcaaagaaagttccggaaaaacgatacatatccattgagggataacagatgagaggatgcccccggagagcgaaagctcttcgggggcatttttgtgcgtaaggagattttttacaggttgtatatgagaaatgaatgttgtatagtatctgcaagaaatatcttctttcgtgaatgttataaatgttggtttcgttacttttattatataacaattggatttaaaggggattataatgacgcggtaaaaaacaaaggagaagaaaacaaacatgagaatttttttggcggaagatgaacaggatttaaatgccattattgttcaaaaactgactgaggatggttacagtgtggatcattgttttgatggcaggacagcaatagatatcctttcctgtacggagtatgatgcagtgattcttgatattatgatgccaaaagcagatggatttacagtgctgcgtgcgctgaggggaatgggaaagacaacaccggtgctatttctgacagcaaaggatgctgtttcggacagagtaaagggattagacagtggggcaaatgattatcttgtgaagccattttcgtttgaagagttgtcagcacgtctgcgcgcaatgatgaggggatctttcggagttactgacaatgttttgcatattgcggatctttctttggattgcacttcccacagggtaatgcgggggggaaaagagatcacattatcggctaaagaatatgccatgctggaatatttcatgtacaatcaggggcgtgtgctgtctcgtgagatgatagaggatcatgtctggaattttgattacgaagggggcacgaatatagtggatgtttatatcagctatcttcgaaaaaaaattgatggtggatatgacaaaaagctgattcatacagtccgtggaagaggatttataatgagagaggaaatttaagatatggggagattctcaatccgtctgaaaataacaatctggtttactgcagcattggtggtaatagtactatttgcatatctgatgatttttgtcgtcagccgtcagattttgataaaaacaatacaggatagtctggtggagacagtggaaaataatgtggatgagattgaatatttttctgggatggatgaaatccgtacagatgcggatattgattatttgattgattaccggaaaggatatctggaaattgacgacgattttctgagcaaggtaaatgaagtctatacaggattgtatgatgaaaagtcaaggcttatttatggagaaaatccaatagctgcaaaagtggcagatctggaatttgtggattccgagattcaaaaagtaatgaaggatggaacggggtattatatttttgaccggaaactcacagcagaaggacttaacggattatggcttcgtggagtggtatcagaggaacagggagagcgtcagagctttgggattatgcggattgcactggttcttctgccggttctggtcgtaatagcatctgcgggaggatattttattgctggacgtacattaaatccaattcagaaaatagctgggactgcaagaaagattggagaagaaaatgatttgaaatgcaggatcaatcttggaaaagggaatgatgaactgcaccagcttgcggatatatttaatgagatgtttgaacgactggaaagtacatttgaaaaggaacaacaatttacatctgacgtttcacatgaactaagaacaccgatggctgtcatttcagcacagtgtgagtatacacttgaaaaagaaagaagcgtaggggaatatgaagatgccttgcgggtaatcaggcgtcaggcgcggaaaatgacaaaacttattgatcatatgctggactttgccagactggaaatgaaatcaggaaaatatgcagaggaaactgttgatatggaagaactggtggcatctatttgctctgatatgaagctgataagagaaaaggaaattatgcttgattatgagacggagcaggcagtgttttatggaaatcgtgaacttttatccagaattctcgttaatcttgtcagcaatgcctatcgttatgggaaagagaatgggcatatctttgtgaaattaaagaaagaagaaacggaacttgttttgtctgtaacggatgatgggataggaattgcagaagaagagcaggaaaagatcttccggcggttttatcagactgatgtatcgcgaggaggcgagggaagtggacttgggcttgccatggtttatgaaattgtgaagttttacagaggaaaaatccaagtgaaaagtgaggcaggcagtgggagtgtttttcaggtaaaactgccgctttgataaaagcagacatatggaaatcaataatgattataaaaaatttgtcgtattaataatgttctaataaatgcatgatataatcaaagtacaaagcaaaacaattagaaatgagaaactctcatgaaaaaaggaggatttgtttatgaagagagcagcaaaacaggttttaattgtacttttggtcgtgatggcggtaattggtacgggaaacatttcagcacaggcagattataactggaaaccgaagaaggtttccatagcgcagtcggcaaaaaaggtttctcagggaaaggagtttgaaatcagagcgaaagtaactccaatagatgctgaggacgattatatccgctgggaaattatttcaggaaaaaaatatgtaaaatttgaggatcgtgaccgcacaggcgatgaaatggatttcattgcagtaaaaccaggaaaagcaaaaatcaggtgttatgtacagggaaagagtaagaagaaatatggtgatacgataactgtaactgtgacgaagaaaaagagtgattattcattggcaaaggttggagaatcggtcaaatatgtagaagcatgggatgattttgatttagaggtcaaaaaaggatcctcaataaagaacagtcagttaaaatgggagatcagtgatacaagtattgtctcgtttgcagaaagaaaaacaaccggaacggacgttgagttttatgcggaaaagacaggaacagtacgggtaacctgtacatgtacaagtggtaaggcaaagggtaaaaaagtagtatataccgtgaatgttattgcggatgatgatgatgactattatgatgactatgattgagcatgattgagagcgaaagctcttcgggggcatttttgacagtttatgcaaaaaatgcccccatttgtgaaatactccatcttcatcttttgtttgtgctatgctgaaattacgaaagtgaaagatgtgcagatcacaaataaagagaggatcaatcatgagtttaaaatacgaatctatcataaaaaagatgtcactcgaagaaaaagccctgatgatgtccggcaaaaacacctgggagacagtggattttgaaaaatacggaatcccgtccatggcaatgtctgacggaccgcacggattgagaagacaggcgggagccggagaccatttgggattaaatgcaagtctccctgcgacctgttttccgaccgcagcctcggttgcaaacagctgggatgaaacattaggcgaggagatcggaacggcattggcagaggaagccgtgaccatggatgtcaatgtgatcttaggaccgggattaaacatcaagagaagcccgctctgtggaagaaattttgaatatttttctgaagatccgtaccatgcaggaaaaatggcggcagcctatgtaaggggaatccagagcaaaggaatcgcagcctgcccgaagcattttgcagcaaacagccaggaactgcgtcgtatggcaaatgattccgttgtggatgagagaaccttccgcgagatctatacgaccggatttgagattgcggtaaaagaaggaaaagcgaagtcgatcatgtcttcttataatgaagtaaacggtgtctatgccaatgagaaccgccacatgttacaggaaatcttagtcgatgaatggggttttgacggatatgtggtatccgactggggtggaagtaatgatcacgcactcggagtgaaaaacggaagtcatcttgagatgccgggcaccggaaaatcaggaatgcatgatatcgtaaatgccgtcaaaaacggaacattagaggagagtgtgttagatcagcgcttagatgaactgctccgtgtcatttttgcgacgcatcaggcgaccgtggatggaaaaggaactactttcaataaggaaacgcatcataaacttgcacgcaaagcggccgaggagagcatcgtccttttaaaaaatgaagagcagatccttccattaaaacaggggacaaaagtggctgtgatcggagactttgcaaagactccgcgatatcagggagcaggatcttccttagtgaatccggcaatgccgccggagtccatattagaggagataaaagacagcggacttacgatgacagcctatgaacaggggtatatcagaaacagaaaaccaaatgctaaactggtaaaggcagctgttgatgcagcaaaaaatgcggatgtggtgctgtttttcggaggtcttgacgagatcagcgaatcggagggactcgaccgtgcccatatgcatatgcctgtggcacaggatgaactgatcaatgagcttaccacagtaaacaaaaatgtgatcgtagtcctctcagcgggatcttccgtggaaatgccgtggtatccgtatgtcaaaggaattgtgcacggttacctcggcggtcaggcgggtgcgtcagcgatgcttaacgttctgaccggaaaagtctgcccgtccggaaaactgaatgagacctatccgcttcattatgaagatacaccggcgtatgaatattatccgagcaaagagagaagcagcgaataccgggagggactttatgtaggataccgctactacacgacagtaggtaaaaaagtgcgtttcccgtttggtttcggactcagttataccacatttacttaccgtgatctggcggtagatccggaaggtgtgacatttaaaattaaaaataccggagatgtgaccggaacagagatcgcacagctttatgtcggaaaagaatctgattccgtgttccgtccgctgcgcgaactgaaaggcttcgcacgggtggaactggctccgggagaagaaaaagaaataaggattttatttgacgataagacatttcgtttttatgatacacggacagacagctgggaagtggaaacgggaacctatcagatcatgatcggaagcaatgcggaagaaatgctgcttgagggatcacttgcggtaaatggaactgtcacagagggtggttacagcagagaaagcctgccggaatattttaatggtgagatcaaaaatatttctgatgatacattccgcagactgtatggcagagagatcccggatggaagctggagcggagaaatccgtatgaatgatgcagtctgccagctttattatggaaaaggaatttttggtaaactgttttacggggtactgcgtattttgttaaagatcagcgaatggcagggaaaaccgaatctgaacgtattgtttaattacaatatgccgatccgcggctatgcaaaaatgacaggtggttttgtcacaatgaagatggcagaagctttgaccgagatggcaaacggacaccgcattaagggaacagcgcacctgatcaaagcggcagtgaaacgtgattaggtaaaatgtaatcagataaaaaagtggtaaataacagggacttgtactaaaataaatttggtgcaggtccccatttgcgttcacaaaacgtttgtgggggatgatatcatgagcgcaagtgagtcaacatgttcacatgattgccgaacggcgaattggagcaggtacactggaaaagaaaatggagaaaaatatatgataaaaattgcaatcgtagaagatgaagcgatgtatgcaaagcagcttgaggaatttttacatcaatatgaaaaagaaaatggggaggcttttgatatcacgatctattcggatggggatcagatcgtcaataaatatcagtcacagtatgacatcattttgatggatgtggaaatgaaatttatggatggcatgtcggcagcggaggagatccgaaaagtggacacggaggtcgttatcatttttatcacaaacatggcacagtatgcgatccgcggctatgcggtggatgcactcgactatgtattaaaaccggtgtcttattttgcattttcacagagactgagccgtgcgatcgggcgcatgaaaaaaagagagacaaagatgatcatggtcagcatgaaaggcgggacggtgcggatcaatatcgcaaatatttattatatcgaaagccaggggcatacgctgatcctgcacacaattcttggcgactatgagacaacaggcacaatgaaagagatggaagaaaaattagctgatatgaacttctgccgtggtaacaaggggtatctcatcaatttagcgcatgtggacgggatcacggacggctgtgccatggtaaaaggtgagcagctggtattaagccgtgcgcgcaaaaaagaatttatggaagaactgacaaaatactggggagaggttatcaaatgatggaacatattatgccggatataccaagaatctacacagcggtcgcagagtggatggcatgcatgttatttattctgccggtcaaaaagagattccgaaaatggcagacagcaggcattatggcagctgtgcttctgatacagagtgtgtttttagttgcaacggatgatatcaagatttatttctggattccgtgtatgatcgttgcggtatttttgatgatcggatttatttacagctgctgcgaaattacttttaccgatgctgcctattttgggatgatcgcatttgttgtcgcggaatttatggcatcgttcgaatggcaggttgtatgttactttttcgacgaggcgatgacaaactggtggctttgcagaggtcttctggttctgatctatggtgcgatcgcactgatcctgtataaaattctgcgggtacatatgcctaaagatgggaaaatgaatatcagccaccgggaatatatttccgccggactgatcgcagttgcggtgtttgctgttagcaacatgagttttctcacggaaaatacaccgttttccggtcgctattcgtttgagatcggaaatatccgtacattagtagatcttggcggtatcgcgatcctttatgcacatctgatccagtgccgggaactgcgtgtgagaaaagaactagaatccgtgcagaatgtgctgcagaatcagtatgtgcagtacaagcagtcgagagagagcatcgaactgatcaattataaatatcacgatttaaaacaccagatcgcattcctgcggagtgaggatgatccgaaaaaacgcgaagaatatttaaaccgcatggaggatgagataagacagtatgagacacagaataagaccggaaacaaagtgctcgatacggtgctcactaccaaaagcctctattgtgcgaaacatgggatcacgtttacctgtgttgcggacggcacactgcttgattttatggatgtgatggatatctgcagcatttttggaaacgcgctcgataacgcgattgagtgtgaactgaaaataccggataaagagaagcggctcgtgcatgtgacggtttcaaaacagaaaaatttcctgctcctccggtttgaaaattattacgaagggaacttagagtatcaggagggaaaactggtcacgaccaaaaaagagaaagaatatcacgggtacggactcaaaagtatccgctatacggtcaacaaatatgacggtgcggtcagcattgatacaaaagagaactggtttgatttaaagatcctgatcccgatgagagataaggttatatgaaaacaaaaatgtaaaaatctatttggggtgttgaaatgaaaaatgagaagaaaaaattaccgattggaatagaaaattttgaagaaatacagtcagctggattttattatatagataaatcatatttgatcaaagaacttctggaaaattgggcaaaagtcacactctttacccgtccaaggcgatttggaaagtccctgaatatgagtatgttaaaaaaattctttgacataaacggaaataaagaaatttttaagcatttaaagattgcacaagaaaccaggctgtgtgaagagtacatgggaaaatatccggtgatatctgtttctttaaaaggaatcaatgcgcagacttatgaaaaagcaatagagatgacggtccagcttatcaaaggggaggcaagaaggtttcaatatctgttagaaagcagcaggctcacgggatatgataaaaaagcatatacggcattacttgaaacggatgtggatgagggaacactatgcagcagtttaaaagtgctttccgaacttcttgaaaagcattatgggaaaaaagtaattattctgatcgatgaatatgatgttccactggcaaaagcacttgaacgggaatattatgatcagatggttatctttatccgcaacctgtttgagtatgcgcttaagacaaatgacagcctgaaatttgcggtgctgactggatgtatgcgcatttccaagaaaagtatttttacaggactgaataatctgaaagttctttccattgcagatgtacagtttgacgagtatttcggatttaccgatgaagaagtaagggagatgctggaatactatgaactttccgatcattacgaggatattagggagtggtatgacggatatcagttcggaaaagcagaagtttattgtccatgggatgtaatcaattatgtggacacgttgcgggcggacccgctggcagagcctaaaaattactggtcaaatacaagcagcaatgaggcggtcaaaagatttatcagggaatcggataaagtaacgctaaggcgtgagatagagcggcttgttgcaggtgaagtgatcgagaaagaaatccatcaggaactgacttataaagaaatgtatgacagtattgacaatctatggagtgtattatttacaacaggatatcttacacaaagaggacgggcagcgggggatacgttccagctggtgattccgaatatggagatccggaagatttttacagaccagattatggatttttttaaagaaaatgtaccgaagaatggcgtgctgttaaatacattctgtgaagcattaagaaacggagaaacagaaacgatagaaaaatgcctgtgtgattatctgcggcgggccatcagtatccgggatacttttgtgagaaaaaagatgaaagaaaacttttatcacggtatcttacttggaattctcgggtatgaggaatcgtggagtgtttcttcgaataaagaatcaggcgatggttacagtgatattgtgatcgagacggatgacggtgaaatgggaatcattctggaacttaagtatgcacaggatggagatttggaaacggcatgccagtctgcgttagaacagatcggtgggaacaattatatagacattcttgaagaggatggtgtggaaaagattctgaaatatggaatcgcattttataaaaagagatgcagggtaatgattggggaaaaatcctgatgcgggataaaaaacttgacttggagtccactttatgagctatactagaggggaaaaagaaaggagaattatggaaaagtcaggaattttaaaaaataagctgtttttgtatctcacggaattttttgccggaatgtccgtgatggcagtagaactgggtgcgagcaggctgttggcgccgtatttcagctcgtcgcagatcgtgtggacgatcatcatcggaacgatcatgatcgcaatggcgcttggaaatatttatggaggaaaaagtgcggaccggtcgccggacccggacaaactgtaccgcagaatactgatcgctgcgatctggatcgcactgataccggtcgtcggaaaatacattatccttggaatatcggcactgctgatctttaccgtcagcagcaatttcctcattattgccgcatttgtggcatgtatggtgatttttgtattcccactgtttttactcggcacagtgacgccatcccttgtgaaatactcggtggacagtcttgacgacagtggaaaaacggtcggaacgctgggagcattcaacacgatcggaagcattatcggaacatttgtgccgacttttgtgacgattccggcagtcggaacctctatcacgtttctcatttttgcgggaattctgatcgcattagccgcagtgtattttttgagcagccacaggggacagaagaaggtggcagtatcggcagttattttcgtactctgctgtggacttggctattcggattcttttgcattctggcagaatgacttaagttacgaaggggaatccatttataattatttacaggtctccgaggatgacaggcgcgtgatcttatccacgaatgtcctgttcggtgtgcagtcactctacatgaaagacggcggtctgaccggaatgtattacgattatgcgatggcggcgccgctcatgatcccggataaaaaggcagaggatatgaatgttctgatccttggaatgggaaccggaacttacgcgacccagtgtaaaaaatatttcggtgatatgtcaatcgagggcgtggagatcgacgataagatcacggcgctttccagacaatatttttccctgccggacgatgtcaaagtgacgacctatgatggcagggcatatttacaggcgatcgacgagaaatatgacgttatcatggtggatgcctaccaggatatcaccatcccgtttcagatgtcatcggtcgaattttttacgatggtcaaagagcatttaaacgagaacggcgtgatggtcgtaaacatgaatatgcgcggaaacaatgagggcaatatcaaccagtatttgtcggataccattgcatccgtatttgaccatatcgtgaccgtggatgtggacggttccacaaaccgggagctgtatgcttcctccaatgcagacatggtaaagacattagagaataacgcaaatgagaccggacattccgatctgcgcgatatgatgcttcatgtggcagacaccagcagtgtgtatgaggcgggagattatatcatgacggacgacaaggcgcctgtggagcttctcggcatgcaggtgatcgaccagctgatccagggggaagttgcatattataaggatatttttgaaaaagacgggatcaacggactgctggagtcactataaaaagattttagaagacaggaaatcaagcgcatgcgcaaacagcttttacaggaactgaaactcatatcagaagaagaaaagaagtatcagtcaggacagggaaacatcgaaaaacagttatatgcgaaagattcgatcagtgagatcgaccgggaactgctgttagagagaggacggctcgtcacggtgcgcccgcacagccgttttgtggaattcccggagcacaggcacaattatgtggagatgatgtatgtggtgcagggaaacatcacacatatcattgagggaaaagagctgacccttcacaagggagatgtgctgatgttaaaccagcaggtgcgtcatgcgatccggcgggcggaatatgaggatatcgggatcaattttattgcgctaccggagttttttga

SEQ ID NO: 5200 - DNA, 193 bp, Unknown
  gut microbiota DNA sequence
ttgcagaacgtgtaaattattatgatgactacgatcgtaagggaccaaaaatctttgtaggagaggtggctgtaaacgaaggcaactatatgggacggttgtatgcggctttgggagaagcggctttccttatgggtattgagaaaaatcaggatatcgtaacattggcctcttatgctccattatttgaaaa

SEQ ID NO: 5201 - DNA, 3377 bp, Unknown
  gut microbiota DNA sequence
atagtcacccgctttcaaaaattgaagttttttcatttctcgaaaccgcttcgctgtacttattatactgtctgctaatagtatatgcaagatgtcgctttcaaaaacatataattttttattttttgaaagtgaaaactatgtaaaggcaacccgaaggctgccccagacatcaagcctatcctgtttacacaggttcgttgtcatcttcatcgacggagccatctacatcatcgtcctcaaactccagatcgtacccatagtcctcgtcatcatccacataatcagcatccggatcaggctttgccacctcctgttccttcttcttttcctgaactttcttgaatacgaagaatccgccgccacaggcaagcacaatcagagtcagaatcgccgggagcatattcgtggattttggataggatcagaataggttatcagcccatacggttattttttactattttacggaggtacgcagatatggatatgaatatagaaatggataaaaatacagctactgattcaattaccagcagactggctgacgcaagaaatgatctcggcattacgcaattatctcgtccattgacacaccaaagactgccgccaataccaccagattatccagggttggcattgccacgccgtgctgccacttgtatactgcctgtggtgttgcaaatccgaatatatctgccagatcctttactgaaagacctgcattgattctcagtcttgttatgttcattcctgttgctgccatatctattgtaggcattgttatcatttttcctcctgttccggctgtcagtcaacaccttcccaacagccgggctgtacaggcgttgctactctgatgccttaaaattgtatataggtttcattacatcaataacatccaccgactccctgattacatctatgatgtcatccaaagacttgtatgccattggtgcctcgtccaatgtattttcatttactgaggttgtatatactccctccatagctttcttatactcatccagattgagttcatttttcgcctttgttctggacataatccttcctgcaccatgtggggcagaaaagttccattccggatttccttttccaatggcaagtatacttccatccttcatgttaatcggtatcagcactttttctcccttatgggctgcgattgcacctttcctcaatatcatttcatctgtgtcgatataattatgaatcgtgtgaaaagcatcactcccagtcatgactgttctttcaagaataacctctgccatcttctctctgcttcttctggcaaatgcctggcatatttccacatcatgcagataatcctccagatatattccttccagataacacagatcctccggcatgcttgtaggactttcatatacctgccagtgaagctgctttagggcatcctgtatctccctttttcttccctgttccttataagtacggataatctcatccctcttttcaagatactccccataaccacggtttaagttaatggcaagtttctgataaagctctgccacctgctttccaagatttctactgccggaatgaattacgagatactttgttccatctgctgcttcatcaatctcaataaagtgatttccgcctccaagtgttccaagagaccttgcaagtctctttgcatctttcagctccctgtagcatcgaagctctgtcagatcaaatttctcctgccgtccttcccacacttcacgtcctgatggaataaaatgtgctgcctcatccactttctcaaaatcaatctcatcttttccaagatttaccgtatacatcccgcatccgatatccactccgaccacattaggcactgccttgtctgttatggtcattgttgttcctatcgtacaccccttaccggcatgcacatcaggcatgatacggatctgggaaccttctgtcattgcataatcacacatgcgtctgatctgctctatagcctcatcctctactacttttgcatagcagagagccgtatttacttttcccttaatctctaatgcattcatttttattttcctttctgattctacattggacaagtgctcctcatgggatttgaacccacaacctaccggttaaaagccggttactctgccgattgagttaaaggagcataaaaaataccgcctgccttatcatctaaggtaagcggtacgctaaaacatgtttatctattatacccctgtccggctatgcctccggttcaggtgcagtatcaaaaacacaattttctcgtttatgcctagccttaaatgagcgcatgtaatcaaagccccactcatgatctttaagcagtgctaacgattgacgttcactatgaagctggtcaaaacgatacattgttgtcatgtctttttcctttctgtggagttctctgcctccgcttatcttctttctgtaaccaagaataacacaattttctgcggttgtcattatacctgtggtataaaatttataactattcagagccatacaaaattgctttctgtgaatgccagcatacatacagaacagcaatttcatatgacaggataactccatgggcaaacagaaagcaggagctctcaccgaaaacagaaattcctcttcccaaaacggatttcatccccgggttccacctccaccatttcctgcggctgtattctcaggccgttcttatgtctttttgttaacagggtcaacctctaaaacgctttgcacttcttcaatcgcaaagcactgacagaatatggcggtgcctcgtatacgaactctgaggaagcgccatgcatattcacggtaatattcttcaccttctccggctcttcaaagctgttttcatcccccttttcaccgctaagaagtgttacggtatagtcgccctgtacctgacagtccagtgtaatggaaaccggatccacatctcctgcaaaattaaccgccttaataatgatttcgtccttggtgtcagttactaccgaaacaaaagcaggtccgtagggaatcgaaatttccttctgaagctcaccatcaacatacaggcgaatctgttttccgtccgtttcatatccaaagcggtgatattctcccggtcttactgaaatagcaaagtcctcagtcagcttgttgtcatgcataaagccaaactcttccagtgaacattgtcctccattaaacttccaaaggaacggacgcaccagagctgcatcccattctttttccactccggccgtaatcacgatctgctcctcataataggaacgaaccaccctggcactgaatatacccaactcgaagtaagcattttcctcaacaaaaatatcggtctcaaatcttcc

SEQ ID NO: 5202 - DNA, 729 bp, Unknown
  gut microbiota DNA sequence
tttactgaaatagcaaagtcctcagtcagcttgttgtcatgcatatagccaaactcttccagtgaacattgtcctccattaaccttccaaaggaacggacgcaccagagctgcatcccattctttttccactccggccgtaatcacgagctgctcctcataataggaacgaaccaccctggcactgaatatacccaactcgaagtaagcattttcctcaacaaaaatatcggtctcaaatcttccataagtctggtcttcttctccaaataccacaaagctcttggtctcatcagcccattccagaatactgtgaaattcctttttctgctcctcatccggaagctgaagcaggcggccatcctctgtatcctgcacatgtcccattaattcatgagtaatctttgcttcttctccattccaaatgggatttctgaagcgaagttccttattggattttaaagatgccattccggttctcggacgataaacacgtcctccctcatcttcggatcgcaccacatattctccgcgattttgaccgaacattttccagacataataagtaggaattccaaggctctgatgattattgaaacgaatcagattaggataccacgctctgtaatttacattttcaaataatggagcataagaggccaatgttacgatatcctgatttttctcaatacccataaggaaagccgcttctcccaaagccgcatacaac

SEQ ID NO: 5203 - DNA, 10968 bp, Unknown
  gut microbiota DNA sequence
ggacacccttgctgttctgctatacacttcctcgttgcctaggcgtgttcgggactttcacccattagagcgcgcccatggcgcgcaaaccaaaaaaggaaccccgcaacgcaggattcctttctcaacaccaaacgaatccctactttaaaagtaaggattttcgcctcgattttctaccatatttattcgcccacttttacccgaaaaatccgcttttactcagcatcataattatccaggaaattgtgatactctccatctttcttataaccaatgatggtctttaaattcacattgctgacactattgaaaatattactgtcgatgaactcactctttttgcgaagttccgtcacaagatctttcatctcctcacgtttcgaaccttttgccccgccacagcttgtacagttttcagtaaaacggcatgcacactggataaactgcaggcggttgtaatcacgccatgccttgatatcctcttctttgacaagatacagcggacggatcagttccatgccctcaaagttctggctgtgaagttttggcatcatggtctccactttgccgctgtacaacattcccatcaggatcgtctcgatcacatcgtcaaaatgatgtcccagcgcgatcttgttacagcctaactcttttgccttggagtacagatatcctcttctcattcttgcacacaggtaacacggattcttatccacctccgcaacagaatcaaagatctgtgtttcaaatgtcgtgagcggaatatcaagaagttttgcattttcctgaataatacgccagttttcctcgttgtaacctggattcatgcacaaaaaaacaagtccaaaattgcgttttccgtgtcggtataattcctgaaacagttttgccaaaagcatagaatcttttccaccggaaatacacactgcaatcttatcgccgtcctttatcatttcataatcatgcagtgctttggtgaaacggctccagattggttttctgaattttttgatcaggcttttttcaatctgctccgtgcgctcttttcttgaatcgtcctccattgtcacgcgcgtgagctgatatcttaaccatgcgcggtaaccaccctctaagttgacagtcgtaaacccatcgtcctctaatatttcagctgcatcacggctgttttcacccacatggcagtacagataaacaggctgatctttttttaaaatagctgtctcacccgcttcaatcttttctaatggaagattaacagcgctctcgatcgctccgtgcgagaaatcattttccggacggacatctataagctgcagtccctctgttccgttctgtgccagttcttctacagtaattgtattcaaaatatttcctccaatttcgttcacttcgtgtggtattacaataaaatattttcccgcttttcgggcaaacccgttgttccaatccatcgattgcatcttccacacacttcctgttatcagcaattacaccgtgcgtacacgttttccttctttgatctcctctaagatctcagccactgcctcacgttcatcaaaatgatacttcacgccacggatttcctgataatcctcatgcccttttccgagcagtacgatcatatctcccggctgggcatttaccatgcagtaagcgattgcttcttttctgtcgtcgatctcgatatactttccattgctctttgccagtccgactttaatatcgttattgatatcacggatttcttcgtctctcggattatcgcaggtcagtacacagagatccgccatctcaccggtcacctctcccatatcataacggcgcagttttgaacggtttccaccgccgccatacacacagatcaggcgtttcggatgatattccatcaatgttgtaagcacgcttctggtgctgacttcgttgtgtgcatagtcaataatcaggtaataatcttttgataccggaagcatttccacacggcctttaacctgtaccttgtttaaaccatctaagatcgcctgatccgaaattcctgccagatgacataccaacatggtcaccagtgaattgtataccgaaaatctacccggaatatgcactcttgcctcacagtccatgcagccttttacatgaaaatgcataccgagttttccattctccttgataaatccaagatccgctgcaaccagatcaagcggcttcccaagaaatgttttttcattattatcctctacgccaaaactgtggatctcacaggtatggtttgctgcaactgcctcgctatgctcatcatccgcatttaaaataccaatcttgcactggcggaatagcatgctcttacattctaaatattcctcaaaagatgcatgttcatttggtccgatatgatctggggaaaggttggtaaacacaccataatcaaacatgattcccgctgtacggtccatcttaagtccctgggatgatacctccatcaccgcatactcacagcctgcctccaccatagatgcaaacatgcggtgcagttcgtaggattccggtgttgtgtttttagacggaatcttttcatctccgatcattgcaccgatcgttccgataagtccaacttttttgccggccgcttccaacacatttttgatcatgtatgttgtggttgtctttccttttgtaccggtcagtccgatcgtaatcagtttttctgccggatagtcaaacagcgctgctgacatcagtgccagtgcatagcgggcagactccacttttaacaccgtgatcgtatccgggatctgagcagcttcttcatcgcgctccacaacaatgacgcttgcccccttttccaccgcatccggaatatatttatgaccatccgtcactgctcccaccatgcagacaaacatggtttcttttgcaatctttctcgaatcatagatgatgtccctgacctctgcatccatgcttccctgtaaacattcatattttatcttttcacaaatcttacttaatttcatttttcctccggttccggacaatttaaaactgcaaagatatcattttttaattttcatttccggcaattattatgataaatcgtccttattcttaatgtacaacttcaaaccatgaaaagccgccgtacattctgcacggcagccccgatatcaaatttctgctgctgttcacaaaattcattctctggcgcacaacctgacagcagatgccaagtccccgcgtgaacagtaacaatttctattatttttctaaaacatgtgacgcatcaatctccgcttcaaatacggtgtgtgatggtcccgtcataaacagatggttcgttttttcatcccactcgatcaaaagcggtccaccgatctgctccacagtaactttgcggtctgttcttccagttaaaacacctgcgacaaccgctgtcgaacagcctgtcccacatccgatcgtctcgccggttccacgctcccactcacggatcttgatataatcacgttttacaaactcagcaaatgtgacgttcgtcttgtttggaaacagggatgtcatatgttcgatcgtctttccgtaacgctccacatcaaggtctgcaacagaatccacaaacattgcacagtgtggattaccccaagatactgctgtaatatggaatgttttatctaaaacctccaccggctgttccacgaactgatctaaatttgtatttacaggaattactttcgtattcagtctcggctccccgatatccgcccggatattagatactaatccatccgtcacagtcaggttcaaatgctgcattccaccaagtgtttcgatcacaagttctgtcttatccgtcagtttatggtcatagacatatttcccgacagaacgaagtgcgttgccacacatttcgccttctgaaccgtccgggttaaacatccgcatccggaaatctcccttatcagacggacagattaaaaccataccgtccgatccgattgcaaaatgtctgtcactgacaaaacgtgccagctccggtaaatttgtaatattctgatgaatggcatcaatatatacataatcatttccaaatgcctgcatttttgtaaatttcatggtaatcctcatttctgcgccgcgtttttacgcattcattgcacgatcaagatctgcgatgatatcatctacattctcgattccgactgacatacgaaggaaacaatctgtgatgccaagtttttccttgatatcaagcggtgtatcttcatgtgtctgcgtggtcggataagtgatcagtgtctctgttccgccaaggctctctgcaaacatgatcatatcaacaccctttaagattttctttactgtttcaaagctgtcaacggtaaatgagatcattccgccaaaacccgtcgtctgttttttggtcactgcataatccttgtgatcctcaaatcccacataatatactttctgtactttcggctgtgttctgagccactccgcaactttctttgcattttcattatgtctgtccatacggactgccagagtcttgattcctcttaagatcagccagctgtcaagcggtgcaagctgactgccatgggatttaatgtgaacatggatcttttctgcgatctcctcgttatcctttacaactacgataccggaaatcgtatcattgtgtcctcctaaatatttcgtggaactgtgtgttacgatatctgctccaagctgtaacggtttctggaaatacggtgtcaaaaacgtattatctacaaccgtaagtgctccgataccctttgcgatctcagaaagtgcatggatatctgccaccttcatcatcgggttggttggtgtctcaatgaagaacatctttgtattcgggcggattgctgcctttacctcatcaagttccgacatatccacataagtgtgctcgattccgtattttccaaaaacatcaccgatgatacggaatgttccaccataaatatcgtcagataagatcacatgatctcccggatttaacagggaaaatactgccatattagctgcctgtccgctggaaaatgcaaatcctttgatacctccctctaaaatcgccatagtacgctctaattcctgtctggtcggattctcaaggcggctgtatgcaaatcctgtggattctccaagttccggatgacggaaagttgccgtctgaaagatcggcatgctgactgctccggtaagcggttccgttccaagtgctccgtgtactgcctttgattcaaaatgtaattcttcttttgtactgtaatcattgtaattgctgaaattcttcatgccgttctccttcttttctatcttattatttcaagtttataaaacatttatttcctgtaactggtctctttcatatgtttctattatataaaacactttttaaaatatatactcgtccagtgctgtgtatattgcaaattgtgcttttttatgttagggttggattgatgtcaggggaaaaggtggattaaagttccctgaatggcagtttgtttttcctgacagcattttattcatctaattcggaaggagtgcctatatgccggaatataaaaaagtcggttatctgacatcgagttttaaattatttcacttgaaagatcagaataaaaaggagttttcctatcactatcacgattttcacaagatcctgatcctgttgaatggtgatatcacttattgtattgagggacgttcttaccagcttgccccgaatgatatcgtgctggttcacgcgggggaggtgcaccggccgatcatccagtcggagtctccttatgagcgtattatcatctatgtttcgccggactttttgaaaaaatacaaggagccggactgtgatctttcacattgtctgaaacaggctgctgctgagcagtcccacgttctgcgttttcacggctcgcgtgctgcaaagttaaagacagcgatacagtcacttgaccatgctaaaaacgataaagattttgcagcttccctgcatcaggaaattttatttttggaatttatgatacagttaaaccgtgccgccatgcatgatggcattgaatttatcaatgattctgcctccgacgaaaaaattatcgccgtgttaaattatcttggcgaacatctgacggaagacatctccattgatactttgtctgcgcattttttcctaagccgctcttatctgatgcacacattcaaagagcagaccggctacacgatcggcaattatctctcgaccaaaagactgcttctcgcaaaggatctgattgcggaaggggcaccgatcaccgaggtctgctatgcatgcggttttaagaattattcgaccttttcgcgcgcatacaaaaaaagttttggagaggccccacgcgagtctctccaaaacctgaaatcctagcatctaactttttctcacacttattgtgtgaacaacagcgtttgcatcttactggcgctctgccatctcattcatgagcgtcggtatgaactgtttctttcttgaaacgattccctctaataaaatgccctcactgcgttcttctttgcggaacgcagctcctaaaattttgcctgcattttccccgtcaaaaataatctttgaagattcctctaagatatctgtcagcataacatagaccatatcgatcttcttttctgcaagcacctgcaccataaacggacgtatctgctctgctactttgtctaactcttcccggctcatggcactgatctgcgctacgccaaaatcacagtcatcggtatggaaaattttgaaatcctgataaaaaatctcttctgtcgttttcccactgaaattactgcccgcctggaacatatttttcgcataagtctcaatatccacttccgcgatcactgcaagagcctccgcaactgatttatctaacggagtacatgtcggtgaacggaacatcagcgtatcggaaataattgcagacaataaaagacctgcgatctgtttcggcacatccacactcttttcctgatacatctgataaatgatcgtagatgtacatccaagcggctggtttctaaaatataccggtgaaactgtctcaagactgccgagacgatggtgatcaatgatctctaagatctcagcctcgtcaatcccgtctaccgcctgcgccttctcattatgatcaacaagtatcacctgttttttctgcatattcatcaaattacggcgtgaaaccattccggcataattaccgttttcatttaagattgggaaatcacggtgtctgatttttgacatcgtctcccgcacttcatcgacatagtcttcaattccgaatgtgatgatatttttctgtgtcataaactgtttgatcggcatactctgattaataagacgcgccacagaaaaagtatcaaacggtgtcgtaataatgatgcagtcatgtttttctgccaaagtgcgcacgtcctcgccgacttcgattcctccaccgatgatcagacagctcgcatttgactcgattgcctgcttctgcgcctcttcccggtcacctaagattaccatatcatcatcctcgatatagtctgccatatattccggatttgaagtagctaccactacctttccctttacaaaataggcatgttcatttcctacaataatcgttccatctaatgttgcggcaatatttttatactgtgttcgtgcctgggataacacatgattatcaaaaacgtccatgtaagacgttgcaatatccttcgtaacaatgattccttcgagttttccaaactgattggttaccggaagtgttacaacctctaattttttcatggtctcccatgcacgtcttaaggaaatctggctgcttacgcctgccgttcttctaaaattgatatccttaatctgtgttcccgcataggtgactaactccggctcctgtgctccaaaataatccagcacataatgtgtctccgcatttactgctccggcacgttttgccacataggttttatcgttttctgtctgattttttaaatatgcataagagagagctgcacaaatagaatccgtatcaggatttttgtgccctacaacccaaacttttctcttttctgcgctcatgaaattcctctctttacctaaaaattagcagctattatatagattgctgcaaaattcacttttcttattttaaaaaagaaagaaacagacgctggcaatgccggcgtcatgttgtataccattaaaagtgaaatactcccatagagtataaaataaaaataatcaatactacaaaatttaagattgaaaaccaggacaacagcttcacataacctttgacagagtccacaccaccctccatctcatccattttttcaattttagaatcaaactcattgaacagatcctgtatgttacgataacatttgacattttccgtgtgtactttttcagaaagatccgtcttaatggactccaactgtgacgttgcattctctaacagttctttgacctccgcaatctgtccctcgctgagcttcttatttgcaatcgcctgttcctctaagaactgtttgttcgcagcgatctgttcttcatttaatttccggttagaagctgtctgttcctcattcatcctgcgatttaaggcaatctgttcctcactggtctttcggatatcagccacctgtccgctaagatctgcctcaatctcagccattttcgtcgtcactttatccgcaagcgcatctacctttcttccaaactcagtaacgatcttgtccgcctcttcctgacgttctgttaaaatatgttctaactcctgtgctttgccggctctctcatccacaagtgactgcagttccgctgccttactctcctttgcctctaaaagcacctgaagctgttttgctttctcgcgaaactcatcgatctgactgatcagtaaatcttcattttccacgtccttttgtgtcctttcctgttcctgcgtgtgcatctgtccactctcttccggcttattccggttcaaaagtcgtacattctgcggcaccatccgctttttccggggttgaagctgtctgaataccatctgccataaaccagccatctgtgttcacttcttccccctttctgatttttttcgcaatatatcatggttattctatcattatcatttttctttgtaaacaataaattattttccattatgttaaacatgtggactgtgaaactttatattttcattaaggatcgcatagatgacaaagaagcgattccaactggaaccgcctctgtcaaaaaagggattattttttcttaaatatgatttcatttcacaaatattatgtttttgattatctacataattttttgaactcatcagctacgaactggacttttgttccaatgacaacctgaacagctgttttacttggtctgataacaccagcagcccctgctgatttgattttcttctcatctactaaagaactgtcttttacttcaagccgaagtcttgtaatacagttatcaatacttttaatatttgctgcaccaccaacgccttctaaaattgctgccgctacagttgtataatcactgctcccaaggtcgacatttttctctgcttccacatcatcgtcttctctaccaggagttttcagatcaaactttgtgatagcgaaacggaatacaacataaaatacaataaatgctgcaataccaagtggaatgatcatccaggtattcttcgctgccggaagggttgcagagaaaagaaggtctgttgctccagcagagaaactaaaacctgctctaaatccaactaataccgtgatcactgtgaagataccatataataatgcgtatacaacataaagtgccggtgcaaggaacatgaacccaaactcaaatggctctgtaacaccacagacaaatgcacagacagctgcggaggcaaccagaccgattgcaactttcttcttattactcttagccgtctgaatcatagcaagagctgcacccggaacaccgaacatcatacatgggaagaatccagacatatacatacctaaatcccatgttacatctgcagacgtctcgcctgcccagaaatgttgtaaatccccaagtccgatcgtatcaaaccagaatacattgttcagtgcatgatgtaatccggttggaatcagcaatctgtttaagaatgcataaatacctgcaccaacaggaccaaatccaacaattccttcaccgattgaaactaatgctccaaataataaaggccagatgaataataagattgcggatacaatgatagaaacaacgcctgcaacgattgctacacaacgcttaccactgaagaatgataaccagtcaggtaattttgtacctttgaatttgttgtagcatgttgcaccgatgataccggcaaggataccgataaatgggtttgcaatcttactgaatgcaagcacttttgtctcattctctgcaattaccggcattaacgttgtaacaacccctgtagaaagaaggtttgtcatcattaaccatgatgccaaagctgcaagagctgctgtaccatcattatcatctgccataccaacgccgacaccgataacaaaaagaattgccatgttatcgatcaaagctcctcctgcttttacaaggaagaaaccgatcatctgaacgataccggaaacatcgcccccctgcatggtagatggacatagcgcatatccaatacccattaagataccacagattggaagacacgctacaggaagcattaatgcttttcccaatttctgtaaatacttcatcataataaaagctcctccttttttttatcccttttcgttttattttatgccgttataagtacggctaaaatacattttaatctccattcttgcgctgtctttcaatgaaaacaacgttttcatttg

SEQ ID NO: 5204 - DNA, 1990 bp, Unknown
  gut microbiota DNA sequence
tgatgccttgctgaaagttccaggccacatgattcccactgaaagcccacagacagcgcaggcaatcagatttaatagcggaatcgagaataacgaaatccctaaataggataaaatacataaaaaactactataaatcataaagtgttccaaattgatacggtcaccatacttaccataaaacaatcttgatattcccattagaaccgcaaatgccatcggccctgctaagtcgccggctgcctttgaaattccaagacctttttctgcaaaagcagaggcccattgacttactgcttgctcacttgctcctgcacatatcatcataatcaacaaaatccaaaaaattttcatccgaaacaattcctttaatccaagtccggtatctccatcctcaagcaatggtgcaatgggaacctttgaaaaaacaaaagcatttccaattggaataaccgcccaaataatggctaatattttccagttatctataccgaccacataaaagaacacggttgatatgagtacaactccggcgtgtccccagcaataaaaagaatgcaacaggctcattgctttttccttattgtcggatgggcaagcctcaacaactggactgactaggacttccaaaagtccaccacctaccgcatagatcattacagcaatcaaaattccaataaaggaaactggtaaaatctctggtaaaactgtaagaaggaataatcctgccgctgctagaacatgagctataatcattgatatccgatatcctattttatcaacaaatctgacagaaagaagatcaaccagtagttgtatcccaaaattaaaagtcactaacaatgtaattttggaaattggaatatgatagcatttctgaaaaaacaaaaaaagcagtggggtaaaattattaacgatagcttgtacaatataacctacaaaacaggctgtaattgtcttattatattggcttttcattttgtcctcctctaataaatgtgattatatcgtaaactttatatctagtcattgtataaaatcatatatttatggtacaatataacaaattttattatttatgaggaaatatagcatggagacttttaagataactacagatgaaacactacgagaaaccatccagcatggcaacaatcgttatccatttgcatactatcctgataatatttggaaatttgacttccatcgcattgactggcattggcatcatgaattagaatttctttatactgctgaaggtactgcgctctgccttataggtacaagtaaaatagaactacataaaggttgcggcatatttatcaatagcggtgtcctgcatcgttttgaagcacaaagcagtacatttgcacctaatattgttttttcgccaaccctattagcacccgaaaacagcctcatttacgaaaaatatattcttcctgtgataagctcgtctgttccatatcaagttttcagtccatccaacacatttggaaaacaggtgctacaacttttgtcgcaaatttgtactattcaggaaactaagccggataatgaattatgtactatacaacttttatttcagctttggaacatattgcaaaaaaatatggactggacttctgattctaacagtattcatcgattaaatcacaaacaagcaagattacaagctatgatgcagtatattcatgatcactacatggaagagattacattggagacgattgcggcatcggcatctatcagcaaaagtggagctttacacatttttcaaactggcatccactgttctccggtagcatatctaattcaatacagactagcacaggctgctgaacaactttatatcactcaaaaatcggtttcttccattgcagaagaaaccggatttacaagttccggctatttctgccggaagtttagacaatattatcatatgagtccaaatgaatacagaaagaagaaaacagaggaaatttcttaa

SEQ ID NO: 5205 - DNA, 3197 bp, Unknown
  gut microbiota DNA sequence
ttcacttcatcgaccggcaattcgctgtcatccgtatcaaaatcaaacagctcatgtatcagttttaatgcctgacaacgcacctgtggtgtgagcacctgttgtatctctatgccacatgtaaattcatcatctatgtatattccaggatatccgaggaactccaggttggatatatattctgatgtcaggagcagatgtttcgctaaaagaagtcttcccgctccatcataaatatcctgtccaagagccattcccggctttaacctgcttgtcggtatatagcgcatgtacttatcctttcaaattacaatacatatattttataccatttattcgtcaaattcaactgtcacaaagtacccttttggggtttcttttacgtctacaacttttccctctcttgatctgatccgttcacttaccgcataatttgcagacatcgcatatgcctttcctaatgtataatagtaggaacttggcagttttccctctgtgaccggcaaaacatccccgacctctaacaatcccgtgcgttccattttaaactcttcacatctcattttctttcctcttttctgcaccggctatatcaaaagcaccattgtcacaccaaaagcattatagtataatatttctacattctcaagaaaaatcacttccggaggctccttaccatatgttgtcagaacacaaagatacgattctggaaaatttcctgtcgtctgcgatccgcactttaaataccgatgaaatttacaatatcctgatagattctctcattttgctgctgaatccccagggacttttactaacacagaatttaaacaccagacgttccttttacactgtacgcagatggggagatattttctttgaaaaagattactccgttccttctgacgcatttctcgaagagatactgcaccaaaaaggttttcttgtaacaggatcagattttcttacggacaatcctctgttgactccccggcagagccgctggctcgcacagcaaaatattcacgcaatcaaggcgatccgttatcagcaggctgtcattggtcttttgtatattgctgacgatgcggaccgcatctacaccgaagaggaacttgtctgtctcgaccgtatctgttactatgctgcgtatcttctgcgcaacgccaacctgtattataatgcttaccatgcttcgatcacagacagtcttacttccttatataatagaaaacatgcctttgaatgtatcaaagatgcctgttcgacggataccccgattggtctgatcctgctcgacattgatgatttcaagctctacaatgagctttacggtgccacggaaggagataatctgatcacgctctgtgcacaggcaatcctttcaaagatcagcccgtctgacctcgcattccgttatggtacagatgtttttatgatactgacacagggggatgatcccaccagtgcaggtgcacttgctaatgagatcatccataatatcatcagtctgcggagcaaaaacgataccgtgtgggacacaagcattacctgtggtatatccactttcccatctatttctccagatgcgaaaacactgctccataatgcagaacaggcgatctattatggtaaactagggggcaaaggtcaccttaccgtttaccgggccggtcttgagacacgttccaccgattcgaacttaagaactgcatacgaacgtgttgcgcctaccatctatgcactgaccgctgcgatcgatgccaaggacagctacacatttatccattccatgaatgtgtcgaaatatgctgtgatcttagccagagatcttggcatgagtgaaaatgacatcgaacttgtgcgtgatgccggtatgctgcatgacatcggaaaaatcagtattccggaacgtattttacagaaaacctcggaactgacaccggaagaatatgagatcatgaagacacatgttgaaaactccacaaaaatgatccgttatctgccacatatggattatgtaattcctgcagtacttggtcatcacgaacggtatgatggcacgggatatccgcgtggtcttgccggtgaggatattccttatatggcaagaatacttaccatcgccgattgttttgatgccatgactgccagacgtccatacaaaaatccgctctctgtctcctatgctgtcagtgaactgaaaaaaaacagtggaacacagtttgatccggaattagtcgacgtatttatccggcttatcaatgaaggtaaaattacagtatagcgcagtctgggcaatcagatgcagcttgctcaaatattctattatcacgaaccaaaaaagtgtccctgaaaatcttttatccagattttcagggacactttttatatctgtttctctttctttccgcttaatcacttaatcgatttctttataatctacgtcgactgctttcgcttcctgctccatatctttcaccgtccgcaccgtctttgtcacaacccacagatcactgattccatcatagatcagggctgctcctacaaactgcatggcaagtttgaccatgccaaacgcattgacaatgcagagcacgccaaatgcaatactgataatggcaatgatcagcataatccaccatctgtcatatccgccattctttgattctaacgccattttcacatcctgcacaccgtgaacagcaagtatcacaccgatcacgatcggtaccaggctcacgatactgctcggttttaagaagatccatacaccgatgattagcacgatcagcccaaggattccggtgaacatataaccgtttctattggtaatataggaaaacagttctacccctccaagaatgataagtcctgcggcaagcactttacatacgatatcgatcgtctctcctggccatacgatcagaaccacgcccaatgcgatgcataaaactgctgacattattgcatccgcctttactctcttaaaaaaatctttcatactctgcctcatttcccgccacacatgttcttatatgtggcgcattttaattcacctcatatattgccttaatttcccttattagaataacatttttttattttttcgtaaacatacattctgtttcagttgtctattttttgctgtggtgttacaatgagcgcagttcattcatgaaaggagttttctctatggg

SEQ ID NO: 5206 - DNA, 2399 bp, Unknown
  gut microbiota DNA sequence
cgtgtttttccgcttgcgtcatcctcgtaggcagtgaccagattatttgcctctaacgtatgtaaaagtgggtaaagtgaacctgcctttaactcaaatacattttccgatctgctgcgcagtgtctcgatcatctcatagccgtacatgtctttttcatctaaaagacgcaggatcagcatggaaaggctgccctggatcagtgatttatttaacatatgaatcctccctcgttttcccgctttatttttgttcgctttactatatatagactgtctatgcatatatattatatagatagtctatatatgtcaagacattctttgctttttattgtagagatttctcatggatttttatagaaatggatgaatctctcatatattttaagattttcacccaaaatattctctctatctgcctttaaacctgccgattgggcgaaaaaacacatttttgaatattaatctcccaaagattatggaaatcacgggcgaattaaagtcatttttttataattcacccattttttaatattatgtaaactaacttcaaaaaaaatcgggcgaaaccagactctgtttttctgatttcgcccacagctttctaatattataaaatcatgttccactcacagcatattccaagccatttcagccattttcctatataatatgccggattccctcacagatttttctcgcaaccagtggattattcatagtatataaatgtattcatcgatatcactcacaagcagatctatgatctgacttaatgcgtaagacattcctgcatcaaaaagcgcttctttgttatcctcatatttatgaataattttctgaaaccgtaccggaaaagaagctccacacatcgttaccatccgtctgatctgagccgcattgatcaccggcatgattcccggaatgaccggaacatttatttccgcaatcctgcagtcatcaacaaaccggaaaaatttcaaatgacagacttttctttttcttagtatatatctcggaaattttcatatctgtactccatttctatgcctgttctgccctcagttttttcgctgcctccaccatatttctaaggctcgcatccgtttccggttttacaccgctgtgtgtcagacgaaacgccggaataggttgtccatagtttaaaactatagacaacctattataatcatttatttacaatttcattattttgaaaccaggatcatcctattcccggttccatatatttttttaacgcattcagataagccgttccgatcctgctcgtcattccctttcgatgcataatgtaaccgatccgcatctcactctcgtccgctaacggaacggcgataatatcctttccatttaacttcttatcgatcacaccactgcataccgtatatccatttaacccgatcagcagattaaacagcgttgccctgtctctcacacggatatttttctttctctccgaaggtgaaaaaatctcctcggaaaagtaaaaagaattgtgttctccctccatcctgtcatcctgtcccttgtatttatcctctaaaatcgcagcctgttctaacacctgtctggcatatcctaaaaaatcctcaccttcctgtgacaggacgatacccttgttggttctctgaaaaataacgatattcatttctttttcaagttcgtggatcgcgttggtaaggctgggctgggaaatatataatttttttgccgtgtttgtgatcgtgccgttctcagcgactgttaccacatattttaactgttgaagtgtcatggctgctcatgatttttatttattttatgcaagactttcacggatcatttttatatcataatccggtgctgctttcattacagcctcataaatcttcctgacttcgtcaaccggttcttccagttcgtctgcaatcgtttgtaaattctttccacgacgcaccttcttcactatgagtgcaatttctttctcctgcattcccttttgtattccttttttctctccagacctctccccggtccgcaagccatcctcataaaataaatcaattaatacgctgttctttacttttttgttttcttttgccattcaaaaatcctttctccttgttacatgaaatggcttttgaatgcttttctttattatataaaacctccaaagcttgttcaaaccattccgcacatattttatttgctgtgataaacggtgatacaccacgacacgattctgttttgaatcgcattgactgattttagatactctttgacagagaaaagggactgcaaaaccgttctcaggtttgcagtcccacttaggaagaattcgtaattcaattttttagatacacaacatctacaagatgcatggcatcttacaagatg

SEQ ID NO: 5207 - DNA, 131361 bp, Unknown
  gut microbiota DNA sequence
gatgttgacaagcattttcttagcccatgccatacggtcttcgtaatctgcgtagatacgttctttggttgcaacgtactcctcgaaatccgggagagtcatgaaccagtctttgtttaacagctcgttgtaaagacgctctaagttctctgcacatccaactgctttcatctggtcgcttacgataaagtcgatcgcacgtttgatgtttgcatcattctcgtagtaacttctggaaacgtaatctgctttctcgtagtgtttgataacttcctcagaagactcaccgaagatataaatgttatcatcgccaacgaactgatgcatctcaacatttgctccgtccatggttccgattgcaacggcaccgtttaacatgaatttcatgttggatgttccacttgcctctttggaagctaaggagatctgctcatggatatctgctgccgggatcagtttctcagctaatgttacgttgtagttttctaccattactacttttaagtatggtgcgacttccggatcatttgcgatcagttcctgtaagcagaggatcagatggatgatgtcctttgcaatgatatatgccggagcagcttttgcaccaaaaataacagtgatcggacgtgccggtttcttgcctgctttgatctcgaaatatttatggatcacatagagagcattcatctgctgtctcttgtactcatgtaatctcttgatctggatatcgtagatggagttgtcatctaactcgatgccctgtgtttttgcaagataattctttaactctgtctttcttgtaccttttactgcaagaagtttctttaatacttcctcatcatttacatatgcgccgagtttctctaactcttctgcatttttcttaaatccaggtccgattaaggatgtgataaattcggtcatctccggatcacagtgtaataaccagcggcggaatgtgataccgtttgtcttattattaaacttctccggataaatcctgtagaagttatttaactctgtattctttaaaatctctgtatgcaggtaagcaacaccgttgacactgtatccgtaatgaatatccatatgtgccatatgaacgcgtttctcatcatcaatgatcgctacggatttgtcatcatatttctttacaacacggctgtttaactcataaataatcggcagtaactgtggaacagctttctctaagaaatggatcggccatttttcaagtgcttcggctaagatcgtgtggtttgtgtaagcacaggtcttagatacgatgtcgatcgcctcatccattaagatgccgcgctccatcaacagacggatcatttccggaatcaccatacttgggtgtgtatcgttgatctggatcactgcatactcgtttaatttgtgaagatctccgcctcttgcaagtgtctcatcaatgatcaggcgcgctgcattgctgaccatgaagtactgctggtatacacgaaggattcttcccttatcatcggaatcatccggatataagaataatgttaaattctttgcaatatcctctttgtcaaaatcgatgccctcaccaactaaactctcatctactgtttcaacatcgaacagatgaagttttgtggtacgattctcataaccaatcacatcgatatcatataatctggactgtaacgtaaaaccgccaaactgaatcgggtaagtaacgtctgtttttgtcagccagctttctttttcgatccacgggtttggtgtttcattctgcaggttgtttttaaatacctgtttgaacaatccgtaatggtaatttaagccaacaccgtcgccgtttaagccaaggcttgcgatggaatcaaggaaacatgctgcaagacgtccaagaccgccgtttcctaaggatggctccggctcaacctcctcgatctctgcaaggctcttgccgttatctgctaaaagttttttcacatcctcatagatgccaaggttgatcaggttgttggataataatttaccgatcaggaactcagcggaaatgtaatataatttacgttttccctgattgctgactttttcttctgccattccttttgtcatctcaagcagtgcatagtaaagttcctcatttgtgcactgtgaaatctctttgccacatctgtttgctacgatttcctgtaatttcatgttttcctccatgttccgcgccccccggcgctgttttcattatgttccccaaccaatgtttatgcatgttcctgttgtcctgatttcgctttttttcgcaaaatcattgtttatgatgttattatagtttccgcaatcacttttttcttgtaatattgactcaaaaagtggtacaatcctatcattatgaatattttagaatatgaaaactatcaggaaaaaattttacatggcgatcctttattcccttatattacctatctctgttcaattccgctggattttgggtatgtgccgatgcactggcacgatgaaatggaaattatctatataaaaaaaggaaacggcacgattacggtcgattttacacagcacacggtctctgcaggggatatcgcactgatccttccgggacagcttcactcgatcggtcagtttgaatccgaatccatggagtacgaaaatatcatttttcatccaaacatgctgatctccaagaaaacagatacctgcaacacggactatctggttcctctactgtccggtaatgtctctctgccgcttttatataccccggacagtccacactatgcggagatttctgcctgtatcgatgcaaatgatgagatatgcaaaacttatccgtccggttatcagctttttatcaaagggcagctttttctgctgttttatactttgtttcataagtgcagcacaaaagaactttccggcaaagaccgcagcaagtctttagaaaaaatgaagctgatcttaaaatatgtagaaaacaattatatggaaaagatcacgatcgaagatatcgcaaacgaagtggacttaagccagtcccattttatgaaatattttaaaaataccatgggaacctctttcgtcgattatctcaacgaatacaggctcaccatggcatcaagacttttgatctcctccgactcttcaatccttgcgatcgcatcggaagtcggttttgaaaatctttcttattttaaccgtatttttaagaaacgcttcggacagaccccccgcgaataccgcaggcggcaatcgccggcttgatgagattctcatagaattcttccgccggctgtggtttgccgaacaaaaatccctggatataatccgggtctaattctgaaatttttgcaaactcatcctctgtctcaattccctcaacacagatcgtcagatcaagtttgtgtgtcattgtgatgatctgtgtcatcagatcatgttcatactgattattcagtgcttttaatgtgaacgaccggtcaatcttgatataattcggtcttaaatcgccaagacagtgcagattcgaataaccggttccaaaatcatctaaaatgacaagcactccgtttttctttaatccgtcccacaatttctgaaaatgtgtattggtatccagataaccgctctctgtcagctcaattcccaccgcggaaggctctaatccatacaggcgcagcgctgtcagtatctccgtcaggacacggctcttcatgacctgcacataggaaagattgatattgatgcggaaattcggaatgtatttctgccacctgctgcaggtcgagattgcctgatgcagcatccattttcctgccggaatgatcagaccggtctcctctaacagaggaataaactcaaccggtgaaatacgctcccagtgcactttctcatctgcatcatgaccatcctcacccacacataccgcttcttttttcgtttctccatcctcacatctctccggcatggaaaaacgcatcagtgcctccgcaccaaccagccggcgtgtctttgtgtccacgatcggctgataataagtctcaaacccttcaaacccatggtttaccgcatgatgcagctgccgtgtgatctgctttttgcgcaaaaaaacatcataatcttcctgcatatatatataacagcggttctttccctgatcttttgctgtatttaatgcatactctgacaatttcatgatattttcataggtcccggatgtttttgcagtatcgactgcacccgcagatatggtaaacacagatttataaccgttttcctcgataaatgtatccaaactcttgcgaatatttttataaagttccgttgctgcttccatatctccgcccgaaaaatcgaccaccataaattcatccgctaatatccggtacagcctctgcgacggtttgatattttccgcgatacagtctgctgtactctttaagatataatctccgtactccattccgaagtcaccgttgatatcacgaaaatcatcgattccgatgcggaggaaaaatccatccggcagtccatcctcaaactgttctacataagcggaaagacttgattcgccaagcagtccgctgacattgtctgccttctgtttctgaccgatctcattgatgcatccgactaaaaaatgcggtttcccgtcagcatcatttaatacacgccccctgcagttgatccacaccggtttcccagcgcggtctaaccaccggtaatgcatgttatgaaaaacgatctccccgctcataatacgccggaattcatcatccaggcgcgactggtcttccgaatatacaaatgtatgatgtgcttttgccgcatcatcaaaattatcccccggtaaaaggaaacgctctgtcgcatgttttgagatcttatagcagtctttctgcagatcaaacacatacagataatcatccatacacggattaaacaattccacgatatattccatctgttctcttgaaaaactattcattatagggtccatattcttctccaattctgtaatctacaaaaacgttatcttaattttataattcgttgcttttattttttcaaaaatatacggtaatattcgctcaaaatccctgatacggcagcatatagtatccgatcacaccactcaaaatccccgatatggcagcatatagtatccgatcacaccgcttaaaatcccgacagcagctcctgcagtgacatcccatacggtatgcacgcccccgatcacacggatcacggcaatcataattccgatcattgctaaaatacagcccgccactggattgcgcacaaataccgtgacggcgatcacaaatacagaaaaaacatgacggcttggaaatgattttcctcccgcgtctttatcgatcaccggcggtagatcatatttctcatacgggcgcggttcattgacgatcttgcggaacaatgtcacgaccacaaatgaaactgcaggaacaagcactgcctgcggcagtaacgtatctctcttaagcagcagcgagatcagataaagcggatagctcacaaaaacaattccggtaagcagccggtttgccagaataatcctgcggacttttttttcatcctgtaaaaaatacccggtcatcttccggtaagtctcccgtgtcatgatgagacctcacttcccacaacggataaaaatgcacctataaaaatacaaaaatctgaaatattaaatataatccctctcagccatttcggtccaaagttaaatttcacataatcgactacatacccttttgtatagcggtcgagcagattatttaatcctccgccgacaagtaaagatgcacctgtcttgctaagacaatgtcccggcatacggagcaggaaataatataaaattccgacaaaaaacataatcactgtatgaagtgcgcgcatcacacgcggctttttagcaagaaaattaagtgctgctccacggttataatatttttcgatcagaatcttattccgacgtcccggatgcaccacgtacctggcatatttcctgtccatgtgacgtttgatccagaaatcagaaccgaaagcaatccctgctatcaatatatatggcatattttttttcacatttttcctccgcactgtcatatttctttctaattatagtactttttgatctattttccaagcacctgattgcggtattcgttcgccgataccccaacctgttttttgaacacgcgcgaaaaatgcgccagattcaggttggcgcacatgcactctatcgcctcttctaactcgtccatattcgacggcttcagcaaaaaacgcgtcacaccaagccgtatcgcttccttggcatattcaaaatcgcgatacccggtaagcacgctcacttcaagatccggaaactgtgaatttaatgctgcaatcatctgcagaccattcatctccggcatacagatatccataaaaacaatatcaggtctttctttttcaatcagattctttccttccgttccatcatttgcggtcgcaacaacacggcagttccagcgctcccacggaatacttcttgaaagtccctccacaatgatcggctcatcatctaccagcaataccttatacatgcattgttctccccttctctttatataccaaaatcgacgatcccaaagggctcgccgattctgattcatgggctttagcctgttgagtgcatcggagtttctcccaacggagaaatggagatgtgcgaaacaataaaccacatgctatgcgggtggtgcaacaaatttgttatacaaaaaaatcacctttccgctaaaatagagttgttcaggctactatttaacgaaaggaaaggtgattttaatggcaaatcaaacaaattctatggcacatacaaaatggatgtgcaaatatcatattgtattcacaccaaaatacagaagaaaagtaatatacaatcagtacaaagaagatatcagagatattatcaaagcattgtgtaagtataaaggtgtggaaataatagaaggacacttaatgccagatcatatccatatgttggtaagtattccaccgaaatatagtatatcacagtttatgggatatttaaaaggaaaaagtcacattgtccttgcactccaggtaaaaagcgtttactataacaattgattttaaaagtaattaccatgtaacctgcaggaggattttatcaatgaaagtttatgtatgtttccctaaaggaaaggcgaaagcactgactatgagctacgatgacggcaaaatccaggatgagcgtcttgtttctatttttaaccgttacggcatacggggaacttttaatttaaattatggaatgatcgataaagaagggcttactccaccacggattaaaagttcacgtatcaacgaactttataccggacatgaaattgcaacccataccatgactcacccgaccattgcacgctgtccgatgacggaagttgcagaagaaattttagctgaccggaaaggtttagaacagatcaccggccgcattatccgcggacatgcttatccaaatggttcctacaatgaagacatcaaacaattattccgccagcttggaattgcctatgcccgtgtcgtagaaccggcagctgattttgcacttccaaccgatccgcttgaatggcacccgacctgtcatcatgacgccccggatctgatggaaaaagctgaattttttgcagaatttaagaaaaaacagtatttaaaattaatgtatgtatggggtcacagttatgaatttgacaatcatgataactggaatgtaattgaagatttctgcgcatatatgggtggcagggatgatatctggtacgcaaccaacatcgagatcattgactatatggatgccgccagacgtctgattttctcagcagactgcagaagagtctacaatccgaatgccatcagtgtctggcttgaaattgacggagatactgtgatagaagtaaaaggcggcacctgcctggaaatttaatcataaccttcttaatcatcatgcttttttcgctctgtcgtttttcgtataaactgttttaccagttcataaataagaaatccaaacagtccgccaatcgtatttaagatcaggtcatctacatcaagacttccgaccttgaacacaagctgcagtatttccacaacaagactcaattcaaagctgtaaagcaccgtataccgcagttttctgcaccgttcatagtagattggcaaaaaagttccaaatggcatgaatgcaatgatatttcccacaagatttaaaaccactgcataagtaccgagaacttttcgataacgtatgaaacgcatgatttcttttaacggtacaagattataatgatatgctctctcactgtaagtccgtcccattttttctgaaaaaaacaagaaataaaacaacaccgcaaaataaacagtgaacaatacgccggcaatcagccggcgtttcttttttctgtcatccatcgatttatttacatccatactgttcatagtatgcatcaattgctttttttatctcatcattaatgacaattttgccctgacactccttattgtaaagatgttctacgacctcttccattgttacaatcgcatttgtcggaaaaccataagtctcccggatttcatcaagtgcactcattttaccgccaagtcccatttccatacggtttaaagaaaccatcagaccaacgatctcaacatttgcagcccctcttactttcggaactgtctcctccatggatttaccggatgttgtaacatcctcgatcatgacaacacggtcaccatcttttaaactgcttccaaggaaacttcccttatctgctccgtggtctttttcttcttttctatccgaacagtaacggacttcttttccatacaatttgctgaatgcaactgctgttacaacactgatcgggattcccttgtatgccggtccgaataatacatcaaaatcatctccatacttctcatggatcgcctttgcgtaatactcaccaagacgcattaactgtgaacctgtcacataagctcctgcattcataaaaaatggggatttgcgtccactctttaatgtaaactctccaaatttgagcacatcactctcaaccataaactcaataaattcctgcttgtactgttccattttatctacgacctcctgtttaacttcctgaatatcgattgtttgcacctgattctctcgtgtcttcacaattatttttatactatcataagtgtcttagaatctcaatctcttttaacttcattttttaacctgtagaaaagacattagaatttttatcagacaagaccctattttaaatcttctgtttcatagcatatctgtctattccgtcagttctcctatcaccgtgataaatctttgctctgtaagaccggaactttctatggtaaatataactccatctttttcaaaaacagcgacataactatacccgccagtctgcccgatcggataacatcccgctgtgaccgtaatcccatgcaccagagacgtggctaaatgtgtatctgtaaatcttgtcacgatcccggattccgttgtacgaactccgattttcaatgtacgtcctccactttcatccgaatagatcagactattattatcatccactgcttctcctgctttatcatatccaacatgataaacaccatccgacaggatgaatccatccggaatggaagtcggacagatctttgttccaaaatattcttccagccccgctgcgtcataagaaacaatctggtccggttctgctacatcataggctatactttccatttcgcggatctcattaaagatcagaccggtatcctcttctgctttttccacccctgcctcatccgctgatccggctgctgtacttccatacataccatcataatcattgaaaaccgtatccacagagttatttttgtttcctgaatatccattcctgatccttccataaaacattcctgcaccgatgatcagcacaaatgctgtcatacacatcgccgccgaaatagtgatatgcgcaggctgttccttctctaaagggattttttctcttataacataaaacatccgcttcatccgtgattttgattttatctcaacttccgcatctgaaacatactttggatcaatatgcccgaatgcatcaatcagatcatctgctttcactgctcacacctcgattccttcctgagcaagacatttccgtaaactttcccttgaacgcatcagagacgattttaccttgctctcactgatggagaatctctttgcaatttcagctatactgtcaaaataccagtacctccgcacaaagatcctgcggttttctgtcttcatcccagccagaaaacggttaatcatctccgtaagttccatattttccacatgtaactccatattttcaccggaaatacagtcctgcatctcttcatatatgtaagaaatttctccctctccacgctttttcgaatgatttttccggtagcggtctaaggatagatttcttgtaatcgctcctaaaaacgcctgcaatatccccggccgctctgtcggcatggaattccacgcccggaaccatgtatcattcatacactcttcacaatcactttcattgtgcagtacattctgtgctatcttgtgacaatatgctccgtatttctgctgtgagcatgtaattgccctctgatctctgacccagtataactcaataatcttttcatcctctaaaaactgccccacgatccgaatcatatcctcctgtaatgtttgtcctgttctgttatgattttacagagcatctgccgcaccaataaaaacaggtatcccattctccctgtctatgatcgcatagacaaatggcctgtccagcacaacattttccactgcctccagacaccccattgtttccacttccacaactgttgccgccccggcctttgtaccaagttcattcacttcaatctttgtccggtgcaatacccggctgatatacagattatccccatttttacaattccccatctgtgaaaaatctgctaatttctcatcaaatgcatcatgcattcccattctgtctaaaacttccgctaattctttctgcgtctccgccttaaactttggcatacctgtttgcactattgtatcatttgcctgagcaattgtctttagaaaagtttctccattcatctgactgatataatctctgatatccatattctcatccggaagcagtgcaacaaagtcaaagccttctttatacggcttgataaatccaacggcatgctcttccttcagaaaagaatattcctccgaatacatcattgatactgttgaatgattaccatcaatatcataaaaatcagcatcatgcacctgttccttttcatacgggtcctgccactccccctcaaatgccactgcatttacaagatacataatagcatatggcggtatctgatccatgatatctttgatcattccatccgtgcgccggtcgatccagcgattgatatcctttgtcgttttttcatcaaaagccgaggcaaagatatctgcctgataaaattcagcgtttaacttcagaaaatcatctgccggtacaaagttctcatcagaatctttgtaccagatagaattcgctgtatataaatgattatttttttcctttggcatggaactttgcagacgctgtaactcccgattgagaagatcaagcgagcagtctgccgtaccgcaaagtacactctccatctgttccaaagtctcgcctgatgctccgtttgcagtcatggcaagcgcatttatcacggaatatggtgatatcattgtattttttccagcttcatagctattttgaaaagcctttattgcaaaatcagcataactgtccgcaaatattttgtctgatttttcatccgatggcagcatctgaacattatctccggattttccagtatcttctttcgttacattcaatttccttgtcgatcctgaaagatgcatgccttctacattagaacacgcagctatccctgataacagaataccagctgttaaaaataatgctactatcttttttgctctttttttcatcttctcttcctccattgtatctgtttcctgttgtttcattgctcttctatagaaaaagacgcaaatgggtaactgcccgttgcgtctttttccaattttttccagcatagaatttgccttactatattttccagtccccatgtaacacatcactgtaagacaatctaattcgtcattttctactgaaatcttctttctgatcttttccagctcttttggtctcaacatcattcgcgataagtatatcatatttcaccagtcgttttccacataaccgtaaaaaagtaaaaaaccatacgatacattttctatatatatcgcatggctttacttattgctttacttattgcttttcaactgaaacaattgttcccgaaaatgcatccacttctgaaagttccccggtatatgttacttttactttatctccaacagaaacattttccaatccctgtggttttgcatcaaaacttaattcataggaagcaccactatcatctgtcacaataaacataaaatctttgatctcgtccaccgttccattcagtgttttctcttcgcctgttaccgcttcagctgtattttccggtacagcttcagtctgtaactctgtttcagcattaccctctgcaccagcctgctgttctttctgcatattatcctctgcctgtacttcctgctgcacttcatttccggcatcagcacgattcgtgcttccacatgctgtaaatatggacatacacattaccgttgctaatacataaattgttttttttctcattccgaatatcctcctgcgtgtttttattacttatcatttgtaagtttcatttatttagataaaataataacaaaaaaagtttcataaaaaaaaattttttattcccgtttcctcgtctgcaggttcatcccagtccgttccgctaaaatgagaggcattccaatgaaatgacgaatactgacctctcctgcccggaaaataataatttgctccgcagatgcataatttttcactccatcagaatctcctccaccgtcacaaacgtatacccctcttttcccagttcatcaatgatcgcaaatgccgctttcaccgaagattccgacgcatcgtgaagcagaatgatatcattttccccgaccttgtcgatcactctttttgcgatcaccccggaattgtccgtcgcccagtctttcggatcaacgtcccacagcacctcgatcatttttgtctcataatccagattacatttccagcagccatacggtggtcttatgtactccgggtatttcccggtgatatcatagatagccgcgtttgtcttatccacctgctcgatcgccgccgcatcggaaaggttgcttaagttgacatgttcgtaagagtgtgtgccgatcagatgaccgccgtcagagatgtcttttacaatctccggatatttttcaacctcttttcccagcaaaaaaaacgtggcatttacaccacgttcttttaaccccgtaagaagttcttctgtataatccggatttgggccatcatcaaaagtgatcgccacctttttttctgcgatatcttccagtgccgcaaaagaaacggtttctgccgcctttccatgatttccgccccactgacagactgctgccgcgaaaataactgcggcgatcagaacatctttcggataactatgtatttttttattatgaacctctctcataaataaaagcaatttttctatcacaacgcccctgaaccgtttgcttttctcttatttgtaatatatgactggtgttgtggcttttatacatactattttctaccaaaaaggcagttatcacttccttgataatctctattcctgcgctgttttttgcgcatctcaagtttgtgcgtaagcacaaatcttgcgtgtgaaaaatcttatttttcacactaactgccccatatcctgttcccactcaactgtacataattttctcgctgtcaaaaatctttgctaacccggccgtcataaccagtgcatacaaaaggtttgccacgattgttaccacaaaattaacaggcacaagatcaaaggaaaaaattccattcatgcactgtacactgttataaaacgggatcagataccagtaaacctccttcggcgcaccatccccgaacatcgtcgacacaccgatcagcatgacgacgatcatcagaggcgaaaccatcgttcctgcctctttgacgctctttgccaggccggacatcagggagattgcaccgataattaccagaaccgtacttaaaatgacaaataacaacagtacataatccgttccactgtaaactgcagcgctcatcgcacccgtcatactgtcatcctcaagcgccgcaccgcccatcagattcggaagtgccagcatcgtgccgataaagctggaaactccgcccaaaagtccgatgacactcagacttaagacttttccgacggcaagctcgctgcgtttcatcggtgtgacaagcagcgttgcgatcgttccgcgctccttttccccgacgatggattccggggcaaccgccatacagccactgaataaaaatgacatcaaaagcatcggtaaaagcatggaaaaaagctgcgcggaagtatctttttccgttgcaacatcatatttcacaccttcttcggcattgatatcaaacttatttgccagagaagattcataatcatcaaaaacctggtacatctgattgtagatcgtcgacgattccgtcgaaactgaattatagtacatgttgatatccggtgctgcctgcgtggtatctaacggatcatatgcagcgacagccgcatcaaaatccgactggaacaccatcaaaagatctgcttcctccgcctcgatcttttctaagacatcagactctttttctactgtaatttccgtcacttccagatcagactctgtctttaaataagaaaacgcctccggcagatccaccgtatagatctgatatacataatcctccgaagcggcaaactgcttcataattccctgccccagaaatgtatacacaatatagatcatcaatcccggcatcaaaatcgtggtaaataccagtcttctatctccaaaaaagcgggcgaactcttttttcatgattgcaatcatttttttactcatactatctcacctgccgtttcccgatagatttcaaagaacttatcctcaagtggcatttccgccgtcacatgggaaagcgtgtcacacaaaaccatttttccgttgatgataatgccgacacggtcgcagatcttttcgatcagtgaaaaaatatgtgttgatacaatgatcgtttttccttctgctttcaattcctgcagaaaatcggtcacaaccttcgccgtgataacatcaagtccgtttgtcggctcatcaaaaataatgatctgcggatcatgcaccagtgaaatgatcagggatactttctgtttcataccggtggagagatttgcaaccttcacttccgcaaactcatccacaccaaatttctgaaacaggatacgttttctctcatcccgctctgcctgatcgacaccgtataattctgagaaaaaatcaaacagatagttcggagtaaaaaattcttccagttttaattcactcgtcagaaatccgatctttttccgaacaccgttcggatctgtcacaatactgcttccgtcaatcagagcatcacctttatccggtttgatcagcgttgctaacatgcgaagcgttgttgtctttcccgctccattgggccctaataatccaaaaacttcccccctgtaagtacaaaaggaaagatcatccaccgcaaccttaactttttccgttgtcttttctaatttctgctgtttttttgacaagtgaaatgtcttggataatccactgactgtcaataactcttccataaccctctccattaaaaatttctatatcatgatcgtaatctacactcgcttcactcggcagtcttattatatcgttccgtcatccatactgtcttcaatatcatcatagatatcatcgtaaatatgatcatagatgtcattatagctgctataagatccaagtcctgtaaaaaaaatcaggatatacagaataatcgatgctgcaaaaccgattccacctgtgatcaaaccaacgatcgccattccttttttgtttccttttacaagctgtatgataccaaaaataatcgcaagaataccggtgatccagctgatacaggtacagaacagcaaaaccgtaatgattccaagtactaacgacgcaataccaaagccttcactttctgacttattacttccatacctgccagccggttgtccgtaattatattctgtacttccgtttgtctgtccatagttataacctgcactgtcatttgaccgtccgtaattataatttgtattgccgtttccatatgacgtatttgtataatacggattgtctgtcatagtcttttctggatttacacgctcttcatttccggtcacagtcttctctaaatttacacctgctgtaccatcagtcatatttttctccaggctgacaggatttccctgatttacattcggctcatcatttccataattccagttattttcttcactcatactctcactacctcttaattaaatccaaccactttctgtgacagtcgatatgccgcaaccgaaatctttctgcctcccttgcccggcagattcattgcatttcccataattccggcgcgcagatgatggaataaacggatgtcgtgatccttaatatatttccacagttcacgttttttcagaagattttcctcagtgccggagcggatcagcataatcgtggaaatgaccgtgatgatttccagataattaaacatgtaatgacgcagttttcggtttggaatcttccagagatcaaattcatctaccataatcttatttacattgatctgctggtcgatacggctgatcatcactttctcattgaccgactgatcttccctgccaataaagtaacggtaaaaatctacatccatataatacagtgtttttacacttggtaatggtttgtacacataaatattatccacataaaatgtatgtttcggcagctctaatccacattcacgcagcagttttgtacgataaatcacagaatgcatcaaaatgtactgaccctttctgaaacgtgacacatcattccaggtaaaaatctgattttggggcaggttcgtgtagtgcatcacttttttatgatgcgcaccttctttttcatatacataattggcaataaacatatccagggtctgattgccgccggtcagctcacgaagtttatctaaaatcttcttataagcctcctcatctacccagtcatcgctgtctaccactttaaaataaagtcctgtcgcattgcggattccagcattgacagcctctccgtgtccaccatttacctgatggattgcacggatgattcccggatatttcttctcataggcatctgctatgtcaccggtgctatcttttgacccatcatcaatgatcaggatctcaacatcatcgccacccggcagcagggatttgatacagttttccatgtaatcctgtgaattgtaacacgggatcgcaaatgtcagtaatttcatatatgaatcctccgattatctttttgtattttctgccatgatcgcatcagcaagttccatcgcttttttcgtcatcgcatcgatattatagtatttgtattctgccagtcgtccgagcagataaaaatgcggcagtccacctgcaagcgcatgatatttttcatagagttcctggttctttggctctaatatcgcatagtaaggaatttctccctccgctcctgtgtaggcaaacggatactctttcacgattgtggttccgtccgtgttcttttgtccggtcagatacttaaactctgtgattcttgtaaaatcctcactgaccgtgtaattgaccacgctgtgtccctgataagattctttctcataatgttcaaagtcaaatcttaaggaacgatatggaagccttccaaactgacagtcaaacaactcatccagtgcgcccgtatagataacctctccgtcaaacggtgttccatcaaaataaatctgattttcttcaaaacgcaatctctctttacagtcaacacctgtctcaaccgtgatgttctcatggtctaacatgcgctcaaacatcggtgtgaaaccttccttcggcactccctgatatttgtcctgaaaatagcggttgtcataagaaaccagcaccggcacacggcctgtcacttccgggctgatatcctccggtttttgtccccactgcttcatggtatattttaaaaatacattttcgtacacaaactgtgcgatctcgcggatgtccggatcttcattttcccgcagtttcatgatcggcacgcggcttccctctccgtatgcagcaatcagtttctgctctaatgcatctgctttttccttttcatataccatatgaagcgtatttaaattaaacggaaccgggatcagacgatccccgacctttgctaccacctcatgtccgaatgcataccagtccgtaaatcttgagagatactgatatacttcttctattcctgtatgaaaaatatgtggtccataattatgtattaatattccatgttcatccggctcatcatagcagttacctccgatatgactgcgtctttctaaaaccagtactttctttcctgcttcctctgcaagctttctcgcactgacagcacccgcaattcctgcgccgatcacgatacaatcgtacatgtaatcctccttgttttccactttgttttaccatagccattctattatacacattttcctaccgcaaaccaatcaaatttttctttagatattcttaatttctgccaaagtatgtagttgttcatattttatttacataattctcacaaacagggcatacggcggtcacaattccccgatatactaaattcaaagttaaggcaacaagttaaaatttttcatagaactttttttcatacctgatgtaagtcaggtagccttgcttatccgataagcaaggttcctcccagcaaatagtgaattacttcacttttcatacacactctttttcataatgaatagccggtgctgttgcaccggctccctctttttataaatattttcttttaagctttcttttcatttccaagaagaatgttcatatatttcgcatacgcagcaaaagcggacggaatagcatatttttcttttgcatcttctgcttccacaaataataatccatctgcacgatttttttcacactgcacctgtggatgcatttccggctcctctacacggactgcataacctgtcatgtgccattcgatatgggaaaaaatatgtttcgcctcacctaacggctgaatacggatcggtgcataccccatctcttttaccatggaaagtacttcctcctgtcccatatttccttccacattcggaagctcatacagtcctgccaaaagtccctttgccggtcttttccggattgcaaccttctcatcatcccttaaaatcagaaccgtttttttctcgatctttcgcggttttgccttgctcttgactggtatctgtccgatcagttcctgtttttttgcctcacaaaaatccttccatggacattcggtacaaagcggtgcaccgtttggcacacagatcgttgctccaagttccatgagtgcctggttaaacgcaccggcaagattctgatgatatacctttgccctcagatcatctgcatcctccatccatggaaatacatttttttcatttctgccgtctgccccatgcatcagtttttctaataatttttccatctcattacggaatgactgtttcatgatatccgtatcatccgcagaaacgcgcgttaaaacacggagcacatttccatcgaccgccggaaccgggattccgtatgcgatagatgcgaccgctcccgctgtataatggccgatcccctttagtttcaacagtttctcataatctgccggaagttgtccaccataattttccacaacttccacagccgctttttgcatgttcctgacacggttataataacctaacccctcccaaagctttaaaagttcatcctccggacacactgcaagtgcctttgcatccggcagtgccgtggtaaaccgctcaaaatacggctttaccgcctccactctcgtctgctggagcatgatctccgaaacccacacccggtatggagtcggttcctctcgccatggcaatacacgggcatgatttaaaaaccattgcaataatggggataccagttgctttaagtcgtaatcttttaacatgtatgtctcaaactttctttgttatatagcagccttcatgtctgcgcttatttttttcaaaccagtaccttatttgaggtcaaactggctgacaaatactgcgatcttctctaaacatttcttaataatgtctttggaataagcataagagcagcggatgtaaccctctgcacaacttccaaatgcgtctcccggaatgactgccaccttctgttcctgcagcagacggttacaaaattccatgctggtaagtcctgtttttttgatcgacgggaatacataaaatgcaccttccggttctgtcacatccagtcccatattccggaacccgtccaccatgatctttcgtctctcatcgtattctttacgcatcacatcgatctcttcgtcacgaaccggactcgtcaatgcttcaagcgccgccacctgtgacgttgttcctgcagacatggtcgtaaactgatggatcttattcatatgaaaaataacttccgcaggacccgctgcaatacccatacgccatccggtcattgcaaatgcttttgaaaaaccatttaataccacacaacgctcatacatatccggcagcgccgcaatagatgcatgctttttgccataggtcagctctgcataaatctcatctgtaatcacaaaaatatcatgtgcggtcacaacctcacggattgcttctaaatcctctttttccatgatcgctccggtagggttgttggggaatgaaatcagcagtacttttgttttatctgtaattttttcttcaagttcttccttcgtcaggcggaatttattctctgcctttaacgggatggaaaccggaatgccgccacacaattccacacacggaatataggaaacatagcaaggttctacaactaacacctcatcccccggatccaccagtgcacgaagcgccagatcaataccctcacttgctcccatcgtgatcaggatctcattttccctgtcataatgaagtccaaacttctctaaatactctgcagctgccgcacggagttcgaccgtaccgcgattatcggtatactttgtctcacctcttttgattgaagcaatcgctgcctccctgacatgttccggtgtcggaaaatccggctcgccgacaccaagtgacaatgctccctccatcgtatttgcaatatcaaaaaagtccttgatccctgaatccggcatctcctttactaccttagataagtatgatttgcttgtgtccatggtttttcctcttttctgtgtctttgtcaaaatatcataccacctatcatagcactttttctaccaaatttatagtgaatttttcccataatctattgacaaattcagggaaaagctgtacgctattaataacgtatattgttaattttttatcaaactattcaggagggttccaaacgatgagcgattttaacaatttaaaactggaagttgctgaggagattgctgttcttacaatttcaagaccagcagcattaaacgcattaaacagcgagacattagacgagttaaacacagcattaactgagatcgaagcaagagacgacatcaaagtcgtaatcttaaccggcggtcctgacaagaaaggcaacgaattcaaatctttcgtagcaggcgctgatatttctgagatggtaaactttaccgcagctgaagcaagagctttcggtatgagagcttccgtaccattcttcaaattaatgaacatgcgtcaggtaacgatcgcagctgttaatggttttgcacttggcggtggatgtgaaatttccatggcatgtgatatccgtatcgcatctgacaacgctactttcgcacagccagagacaggtcttggaatcattcctggattcggcggtacacaaagacttgcccgtttagtaggtatgggacgcgcaaaagagatgatctttacctgcgattccgttgatgcagcagaagcttaccgcatcggtcttgttaataaagtagttgctccggaagagttaatgaacacagcaaaagctatggctaagaaaatcatctccaaaggaagctacgctgtttccgttgcaaaagcagcaatcaacaacggttatgatatggacatcaagaacgctgttgagatggaagcaaacttattcggcgtaacctgctctactcatgacaaaacagaaggtatgactgctttcttagagagaagagctgctgatttaacagatttctaaaaaaacatatcaaaaaaaacgggctgataattcagtccgtttttttgatatactcatattccaaatttaatgtgcaggtaatctctgattacctctacgcatttttcacgcccccatcaaaaccgacaccaccggcatcgtcaccacagcaagaattgccgtaagcgcaactcctcttgccgccagatcataatttccatcatattgctgtgcaagcattgctgtcatactgccgacaggcgttgcgagcatgaccatacacacgcctaaaatcatcggatcatcaacaaactgctttatgatccatgtgcctgcaatcaaaaaaagcgtcagaaccctcttagttccaacgcctttgtcaataatttttatcatttgtatgtaatatagtcgatagctatatttttgtcaatatcccgctgtttctatatttcagtggagaaatgccatatgtttttttgaaacttctgataaaatagcttacattctggtatccgctctgcatagctgtctccgtcactgaaagatcggtgtcctgtaacaactgttttgcattctccaaacgtaaatatgttatatattgcgacaatgtaatatggaaatgttccttaaaataccgcgatatatatttttccgaaagatgaaactgttccccaaattcctttagcgatatctttcctgtaaaattctgctgtatatatgaaaccatctctttttctacaatatttctgccgcttgtatcattttctattacaaatcctttcttccacatttcaagaataaattgtaaaagaattatttttgtctttatctgcgcagttatttttgactcagtttcatcattttctgccatatatatatcaatcagctgctcacacagttcttttgccgagtcttttactcttgggtttatcatcaaatgaccgctatttaatggttcaagcaatttatcatctaacatgtcatcggtccgaaaagatatatattttaacggaaacaaaaatgtaaaataatccacagtgccggtctgtgagcccataagatgcagattgcccggcgatacaacgaacgcatcccctgcttttccaatataactctctcctgatatacttaccgtcagcaaaccactttttacatatataatctcaaattcatcatgccaatgtaccggtatctgaaatgaccgccccgcattctctatgtgatatatactaaatggattgtcctttgtaccatgtggtttattttcctttaattcaaagtacatactctctcctacaattctacaaggctcttgcttttccattttccgctcttccatctaagcaccattccaacagctctcgcgcactcatcacctgccatggcaatatatgctcctactgcctgaagtcccatatgtattccaagaaaatatgttccaccaactgcaaacagatacataaatatcgcacccattataaccggaaaaaccgcatctccactggtttttaatgcctgaccatatacaagatttgtcacccttccaaattcaaggaatatatctactattaacagccttaccacaagatttatcatttgcgcatcatccgtaaatatatgaactataaaatgtccggacatcgcaaatgtcacagagaagcacgtcgctgttataagaccatataccacagctttccgcgtacccctgtcacattcttcaaactcctttgatccaattctccagccagtcataatagcattagcctgtgcaagtgcagctcctatacaatacgaaaaatttgctatctgcatagcatatgaacgggctgtaacattcattccgactgcatccatctgattcatgaatcttactataagcgtcattgcaacattataaagtgctgtttcaaatgcagaaggaaaacctatcttaacaatctgcgcaagtatcttccgtggcggaatgcgctccggactctgctttgcctttatcagtacagcacccatgcctgctacaatgataaggttcacaacttttgaaataactgtggcaatagcaacgcccattactccccaatgaaatacaaacaggaacactgaattaaatattatattaatggcatttcctgcaatcgttcctatcaaggaatgctttgtatatccaaacactctgagatagctggaaaaaatgggaataagcgcatttaaaaaacatgcacctccaacaattttaaggtatgtttctgccggctcaagcaaagccggagaaatacttacgattctaagtatttctccagaaaaaaaggcaataataaccgacataaggatacctgtcagtgcgttaaacataagtccaagctgtctggcctgatatgcaattccaggtctccccgctccgatattttgtgacataactgctaccataccggatgatattaccccgaacatgatgataaaaacacttatatacgtatttgctgttccgacagctcccacagcctggtcgcttacagacgataacataagtgtatcgaccatgcctgaaagcatataaaataaagtctctaagcatattggcacagccaactgtgtcaatgtttttctttcagttgccatgtttttctcctatgaaaactaatataacatacattatcaataatatggtatttttctgcatatttcttgtataatattatgcaaaaattgcattatttctacttatttacgaagtgaatcagcaagtctgttaattttgccctgatctgcattatcataggaaaatattttatgattccacattctcatctctgcataaaatgttgacgtttccccccaaatagactaggatagaatttgaatgataaatacgcaaaacaaggaggaaaatcctctgctcctgcaattgcagtcgcattttgctccgcaaaacaaggaggattttatgttagataaaatgattggttttatcggtgccggcaatatgggaagcgccatgatcggcggtattctggatgcatctttagtgacgaccagccagatcatcgcaagtgcacactctcctgagacacttgataagatccggacaaaattttccatagagacaacccagtcaaacgaggtcgttgcagaacgaagcgatattttgtttctcgctgtaaaaccaaataaattttccgaagtacttccgcagatcaaaggtcatttaaaaccggactgtatcgtagtttcgattgcagccggacagccgatcgcaaatatcgaggcgctgctcggtgaggtcagactgatccgcgccatgccaaacaccccggcgcttgtaggcgctgcgatgagtgcactctgtccgaatgacaaggtaacaccagaggaagtaaagctcgttgagtccttattcaacagcttcggccgtgcagaagttgtaccggaaagcatgatggatgccgttgtcggcgtttccggttcttcccctgcctatgtctatatgtttattgaggcaatggcagacgccgccgttgcagacggcatgccgcgcgcacaggcttataaatttgctgcccagtctgttttgggcgccgcaaaaatggtattagagaccggaaagcatccgggcgaattaaaagatgctgtctgctctccgggcggtacgaccattgaggcagttgcagctttagaacatggcggtttccgtgatactgtgatcagtgcacagcgcgcatgttctaaaaaatcatatgatatgagtcaaaaataatttggaggttttcttatgtgggcttacgaaagtgttttttatcagatatatccgcttggattctgcggtgctccgtttgagaatgacggcgttttagagcatcgtattttaaaggtcaatgactggattccgcacatcaaaaaacttggcgccaatgccatctatttttccccggtctttgagtctgacacacacggttacaataccagggattatacaaagatcgataccagactcggtacgaatgaagactttgccacaatctgtgacaatcttcataaagaaggcatcaaagttgtattagacggtgtattcaaccatgttggccgcggtttctgggcatttcaggatgttttggagaaaaaatgggattccccgtacaaagactggttccacatcagttttgacggcaactcaaactataacgacggtctgtggtatgagggctgggaaggtaactacgatctggtcaaattaaatctcagaaatgaagatgtcatccagcacatttttgcagcgatcaaaggatgggtggaagaatttgatatcgacggcctgcgcctcgacgttgcatactgccttgaccatgatttcttacgccgcctgcgcagcttctgcgacagtttaaaaccggacttcttcctggtcggcgagacattacacggcgattacaatcagtggatgaacgattccatgctgcactctgtgaccaactatgagtgctacaaaggactttattccagcttcaacagcatgaatatgtttgagatcaaccactccctgctgcgccagttcggaccggacaactggacactctataagggtaaacacctgctctgctttgtggacaatcacgatgtcacaagaatcgcaagtattttaaccaacgaaaaacatctgccgctgatctacggcatgctgttcggtatgccaggtatcccgtgcgtttactacggcagtgaatggggtgcaaaagcgagaaaagaagaaggcgatccggctctgcgcgcatgttttgacgcaccggaatggaacgatctttctgagacgatcagccggctttccgagatcaaaaagaactcggaagcattaaattacggttccttccgctctgtgctcctgacaaaccgccagtgcatttttgaacgtaaaagtgaacatgagcgcatctatgtagcgatcaacgcggatgaaaacagtttccacgcagatttcgatgccggatgcggcacggcacaggaactgatcaccgataccccgcacgactttggcggtggaacagacctgcctggctattctgtggcaatatggaagatggaacattaatcttttatgctgtataaaaggacgggaatccgcagtccggatgtcattttcgtgacatccggactgtgctttcccgtccttttttctcattctgcccctgtgatccggaaatctcccgcatcttttgacttaatattcattgtgatacagcagtctgccatatgctcataattgacctcgagttcgtaattgaccttgacatcaatatcattttctgtctcctgcacatccacactttttgcgtcgatcccgatcagaaggcttccatacggcgtataataataggtcacattcttccggtttttctcaaacatcatatgtacattcgatacacctctcctggtgatatccataaaatcatcattcagtttgatgatatttcgtgttgtctcggaaaatccctcgttgacttcatcatagatgatataatgttttccattttttttataataactgccggatgtgatcagttccacggattcactctcagtttccggtgaaaactgaagcccgctgatggttaccagtacttcttttgtcattctaatcctcatttcctgttgtttctttacatcagaactatattatacgcttttcgcctgatattcaatactatttttcatcatacagcccttttaaaatttcaaatgacttaaattttacctgataatctccggaggcaagtacctgctgatattcatcttccgacaaaactctttttagcgaacttcttgcatcctcatcgatcacctcatacatggtatccgaaaagcacatgttcgggtacatcacacaccaccagttgtgtccctttcccgctccgatcacgatctcaagcgcctcataatttcccgccggaaatgtatacgcaccatacgtttttaccggaaaatccgtatctgtcagacagatatccacatcatagtcataacctctctccgcaatgactttctctgccgtctgcttcatgtcctccatatttttccggatcacagcctccgaccggctccggtcggctgcatcttttaaaagccctgacattttgattccgactgcatcacgcacagcaagttttaaattctgatccgctttcgtatcactgtttgcgatcacatgaaaacgtataatcttttctgcgatgcctttttgcatctcaagccgctgctcgtaccgtaacccggcaatgcaggcaatggaaaataaaaaaaacagggttatgtaaagggaatctttttttgattttatggttggaaatttcattggaatactccttttttttgtttgataggaggagtattccacttatctgggtttttatacagtgttaaataatccctttttcactcacccatatttacccagtcaaccttcacccggtaaatgatttccatatctttttcatactgctccggctgcttctgataaagcagataccagtccctgcgctgtccgccaagttttttataactgttcgcgcagtcgacttccactttctgtgcagtttgctgaaaataatcttcaagttccttttccaacatcttttttatatccccagattttaaattctgaccatattcagactgcaatttctgtctccatcccggtttttcatacaggatctctccgctgcagcttatttctgcgataatctgtttttcttttgtctgtgaaaagacaacctgattatgcggtgcaaacaaacgcacatccactccgtccgcaagtgtcagtgtgtattcttccttctgattctgtgtaaaaaaagaaagcagcgccgtctggctgtcaaacattccttccgcctccccgcgtttccagacataatactttgtcacggcaggcttttggtccacttcttccacataggggataaacagggtttccattttgttttcctgctcctgataaagcatcccgagtgtcggataggcagtttttttgatctcggacacattttcaaaataatcttcaagataagtgccaacggactcttccatatttttctgtaattttaatacagcctctgcatcctctgccaccgcaagataggtgtttctcggcacgtcactctttttttccagaatttccagaaatgcatccatattttgggcatcttccaaaaatttctgatccagtaaaatgactttcatgtggctgtaatccaccatgcggttcccggactcgtcggcattcagccattccctgtcaaactgctccatgtcactgactgccatctcgatcggaaaattgcgctcctcaagttctgccgtcgcacagccggaaagccccatcagtcctaacaggacacaaataaccgctccggatctcagatgtttttttctctgtcctgcacaccgtatgatcgccaacactaccgggacaagcaccagaaatggtgttccgatataccacagaaatttttcatacagcacggtattttctttcgagttatacaataacactgccacaccaaaaactgctgcaaacaccgccgcccgctcccactttttccacaatgcctgtcttttttttgcatgatataaaccatttaataacatttctgcataaaatactgcactgtttagcagtgcatacagtgtaaaaaaccagattccaaacataaatgcatcagcacgctttaaaaatccacctgtgattttgatcgtgctcatcagtgtgatcgccggagtctgcatgtctgagagcgcagcaccaccaaacacccccagtaagatcagataaagtcctgcctctaagcatccggtaaaaatcaacgcaagcctccccactttcatcaggctttcccgctttcgcagataccctcccagaaacaaaatcagaaaaataagtgacgaacagataaacacataataacttcccgcaaaaaaatctctttttcccgtaaaaaatacaggattccagtaatctgttttcacttcatccagtgcggacgctaacatgataaaaagcggtatcaggataaaccagaatagcagttcgtagacacgcgcccgcccctcaatcccgcttaacagcccataccagacaagcccaaggatcagcaccagtacaagataaaaagactccccccgcagcaggttgtttaacaccgtcacagaaaacagatacgccgtataccctgctaacagcatcagatacagaaaatatcccgcctgtatggtctttccgaaaaatgtcccgcacattttttccgtatattctgcaaagctgccctgcatatcccccactgcatacaccagaaggcgtaaaaataaaagtccaagcactgttcccacaataatgcagaaaatgccgtcccgcccgcagaacccggcgaccgcagccgggatcagaagcgtgccaagtcctaaaagatcaaataccaaaaggcggaatgcctggcggcctgaaattttttcgtttgatgaaaacataattccttgtactcctttttatttggtgtttgtttcaaacattcatccttatttcaatttcagtttcacccgctcctcccgccgggcgtagatcggacgttttgtcagtttgcggatcggccatctccacaggaaatcacgttcgtcttcatagtccgtcagatctgccccgacaaacggcatcagatatgggatgccaaagctttttaaatgcgcaagatggatcagtacaaagagcagtccaagcagcatgccaaagtagcctaaccacgcacacattccgataaagaagaacttcaacagacggaatgccgtcgcaaattcctcatttggaattgcaaaggaacagagcgcagtaaatgagatgacgatcaccacgatcgggctgacaagatttgcctcgaccgccgcctgtccgatgatcagtcctcctacaataccgatcgtatttcccatggcgccgggcagacgcacgcctgcctctcttaatagttcaaatgaaagttccatcaaaatcacctcaaccaccgccgggaacggcacaccgctcctcgcatccgcaaaagacaaaagaagcatcgtcggcagaatctgcgtatggaaatttgtcacggcaagataaaatcccggcagagtcatggcaaagaaagatgcgacatagcgcaaaagcctgccgaaacttgcgatttcccaccggttgtaataatcatcgctcgtcttaatgaacgaattataatcagtcggcaggatcagccccaccggggaattgtcagaaagcacaaccacccttccctccaaaacagccattgctgcacgatccggccgctctgtcgtctgaaactgtggaaatggggaataccacttctcctcagtgagctgttcgatcacaccactgtctaacaccccgtcgatctcaaatccctccagcctgtgcccgatctcccgtaccagtcccggatacaccagatcctccataaaaacaagataaacattggtattcgagcgcataccacattttttctgcttcaccttgactttcggggaacggatacgctttctaatcagcgccgcattctgttttaccgaatcacaaaacccctcgtttgaaccccttatgaccttttcagaatccgcctccgtgatccccatattcggataaccgtcgtccggtatctttaccgccctgtcaaatccgtccacaaacaggatcacctctccggtcaaaagcccgtccaccgcatcctctatcgtatcaaaataagttgcatccgaaattcccagcgcattctgctccaatgcctgataaatttcctccttcccaagcccctttaaatacttcagcacctcactcagtgccgaagtccccatgtccaccgacacctcaataaacgtcagataacatgccacatccatctgcctgccaagcatcaattccttctttttaatatcatcgcactcatgaaaaaactcctccatctgcgcgatattctcacttaatctctttgaaaccgctaccttttccttcataatatccctcatttcccggcaactaaaaaaggataagcctacggcttatcctcaaaaattcatttcccttattctatgcaattttaaccagattatacaaagctcccttactcctgctctctgatcatttccttgaccgccacaacctgatttttgacatgcttatgcattgcttctgtcacacgtcccttatcctttgtcatcaatccttccacgatctcactatgttcccgcatcagtgtcggataatttctctcatcctttaaatattccacacggtaacggtacatctgctctctcaaattattgagcatattgacgagttttggattgccggtcgcctgataaataatatcgtgaaactgcacatccgcagcggcgatctttttcaaatcttttgatttggtagattcctcaaactcatgcattgtttccgtcagagtatctaactgttcctttgtcatctgctcacatgcaatcgatgctgcaagttcatctaacgcatcacggatctgaagcacatcctccatatccttttctgtcatcttggcgacttccgcaccttttctcggaatcgtgaccgctaagccctcctgctctaacatgcggatcgcctcacggatcggtgtacggctgacgcctaactttgcagcaagctgcagttccatcagacgctctccgggttttaactctccttttaaaatcgcctcacgcagtgtgttaaacaccacatcccgaagtggcagatacgcatccatattcagcgtcaaatcgtctgtcataaacctgttttcctccatttcttcgcttatctcatgttgttgtaaatactggtcaggtaaacctgctttgccagtccggatgcctgcatcgcctcatatgccgcaaccgctttctccttatcatcaaacagtccgaataccgtcggaccactcccgctcatcatagctcccgcagctccatgttccatcatatgttctttgatctctgcgattaccggataattcggaatcgtcacagtttctaaaacatttcccatatctgaggtaatggctgcaaggtcttttcgtctgatgtcttccaccagacggtcaatatccggatgaactgtattttcatccagcttcagattctcatatacaaactttgtcgatacagaaatctgtggttttgcgatcagtatcggacattttaccatcggtggaagtgcggtaagctgctcaccaattccttctgcaagtgcggttccacgcataatgcagtaaggaacatctgcaccgatcttaaccccacgctgcatcagttcttctttggacagtccaagttcaaacatacggttcataccataaagcaccgctgcagcatctgtacttccaccggccattcccgctgcgaccggaatatacttgtgcagcttcacatcgataccgtccctgatctgaaattcatccatcagaagttttgctgccttgtagacaagattattctcatttgtcggcagaaaagacagatttgtcgtcattgtaatcccgcctgctgtctttttcatttcaagacggtcaaacaggtggatggtctgcatgaccattttcacttcatggtacccatcctcacgtctgcgcacaacatcaagcccaagatttatttttgcaagtgcttttactgatatttccttcataatccccataccatcgtcatgtattttcgttgttttttgtatacaacataaattttatcattttaaggcaaaaaggtcaattccatctaaattatttttcccgaaaagccgatatattttacagaagaaaaaggaaaaaatgcatgaacaaatcagtcattcatttactggaatggaggaattatttatgactatgaatgcaattaacagcgtaaattcaacaactaacagctatcagacaggcacagcttctaagacagcttctacatctacagacaaaactacaacatctgataaggcagaaaccggtgtcgtatatgagaaatcttctcaaacagacaaggataccgttaccaaaaaaactgactatgcaatggttgcaaaattaaaagcagatgctgagcagcgtacttcccagttacgcagcctggttgaaaaaatgatgaccaagcagggaaccgcaatcgcaaatgccgattccatgtggagcttcttagcagatggtaactttaccgttgatgaggaaacacagaaacaggctcaggcagatatcgctgaggacggctactggggtgtagagcagacctctgaccgtatccttgattttgcaaaagccctttccggcaacgatccggaaaaagcagatcttctgatcgacgctttcaaaaaaggctttgaagatgcaacaaaatcctggggcaaagatctgccggatatttcccagcgtacctatgatgctgttttggagaaatttgacaaatggaaaaacggttctacgaccgaagctgccggaactgaaacagaaaattaatatgtaaattctatcacatgaaaaaaatgcaggaatcatattttatgattcctgcatttttacttacaaactttttcgctgcggtaattcctgtattccagataataatgttaccgcagcgtgtgtaatctaatctgttatttttcttctaagatcttctcaatacttgctaatttcacacaaacaacaaagatttctgctgctgttgtcagatcctctaagcttggataagacggtgcgatacggattacggaatctttcggatcctttccatacgggaacggtgcacctgccggagtcatcacaacacctgctttttttgcttttgcaacaacattctttgcacagccctctaaagtctcataagtgatgaagtagcctccctttggtttgtaccaggttcctacgcccaaatcgccaagttctttgtcaaacatgtctgtgatcatctcgaacttcggacgtaaggatgcagcatgtttgcgcatatgctctgtgatgccgtggatgttcttaaagaaacgtacatggcggagctggtttaccttatcatgaccaatggtctgaacctttaactgttttttgatatcctccaagttgtttgcggaagttgcgatcgcagcaacaccggaaccagggaatgtgatcttactggtggaacagaatttgtataccatatccgggtttcctgcacgcttacactctgcaaggatctcaatcagatgatcctgatcgatatcatataaatgatgtacacagtaagcgttatcccagtagatacggaaatcttttgcagccggtttcaatcttgcaaaacggcgcacagtctcatctgaataggtgataccctgtgggttggaatatttcggaacacaccagatacctttgattgcctcatctttgctgactaaatcttctaccatatccatatccggaccggttggcagcattggtacattaatcatttcaatgccaaaatattctgtgatggcaaaatgtctgtcatatcccggaaccgggcataaaaattttactttatctaatttgcaccatggagtacttcccataacaccgtgtgtcatggaacgtgcaatcgtatcgtacatgatatttaaactggagtttccatagataatgatattatccgggttgcactcgatcatatcgccgatgagcactttcgcctcatggataccgtcaagcacaccgtagttgcggcagtctgttccatcttcacaggtcagatccacataggatgctaagacgtccatcattcccattgacagatcaagctgttcctgggatggctttcctctggacatgtcaagttttaatccacgctgctggaatttcttgtactctgcctcgagtgatttcttttcggctaacagttcttcctttgtcatttcctggtaagattgcattgtttgcttcctcctcttggttcgctatacattatttatcattcatgggaatattcccctttgatcttgtggaaatattctctgatctgcttttcataaccgttttctgacggtctgtaaaacttccggccggtcagtccgtccggcagatactgctgctctacataatgattcggatagtcatgcgcatatttatagcctacgccgtgaccgagcttcgatgatgatttgtagtgggcgtcctgtaaatgtggcggaaccggagctgtcatcgtatttttgactgtctccatcgcctcgctgatcgccgtaacggcggagttgctctttggcgcactcgccacataggtaaccgcctgcgctaagatgatctgcgcttccggcattccaatacgttctaccgcctgtgccgctgacgttgcaaccacgagtgccatcggatctgcattgctcacatcctctgaggcacagatcatgatccttcttgcaataaacttgatatcctcccccgcatacagcatccgcgctaaataatagactgccgcatccggatcggatccgcgcatacttttgataaacgcagatacggtatcgtaatggttatcgccggacttatcgtactttaccacacgcttctggatacattcggaagcaacggaaagcgtgatatgtatcagaccgtccccgctgcgctcagttgtaaggattccaagctccaccgcagtcaatgcggcacgcgcatcaccatttgagatatctgcaaggaaatctaaggcatcctcatcaatcacggcatggtatgcacccatacctttttgcgtatcatttaccgcccgcaaaataagagttttgatatcctctttttctaagcttttcagttcaaaaatgatcgaacgggaaagaagagccccattgacttcaaaataaggattctcagtcgtcgcaccgattaagatgatggttccatcttccacgaacggcagaagataatcctgctgtcccttattaaaacgatggatctcgtcgataaacaggatcgtcttttttccaaacatccccatgttattcttcgccttagcaatgacatcttccatgtctttcttcccggcagaagttgcattcatctgtaaaaattctgcgcttgtggaattggcaataaccttcgcaagcgttgtctttccggttcccggaggtccatagaggatgatggagctgagcttatccgccttgatcgcacggtacagtaacttgtccttcccgatgatatgctgctgtccgaccatctcatctaaagtcgtcggccgcagacgcgatgcaagcggtgactccgtctcttttttctgttctctcatatattcgaataaatccatgtttcaacctgtctttctgttgcgtacatttgctctttttgcatttttcattctgcaatcttgcattttaaagtttaaaaaaacattcttttgcaataattcctgcaaatatgacagattcgcttttcaaaaattcattcatctattaccatacaggaatttttccgcttttgcaagacgtaaaattattttctctgttctgtatgtttttccctgaaaatctgtcaccttactgtgcaaaagcatggacatacttctgaaatgtttctccacgctcctcaaagtttttaaaataaccgtaagatgctgctgccggtgaaaggatacatgcgcctcccggttcggtcatctgtactgctgcttcaactgcctgctctaaatcttccgcatagacacagttctcacagtcgccgacttccccgaaaatacgttttccggatgcgtatgcacagataaactgaaattctttatgctccctgataaatgcgaccagaagatcataattaattccacggtccatacccccaatcaggaccgtctttgcatccggaatactcatcgccgcattgatggcagcctccgggatcgttgaaatcgaatcgtcataatatctgacgccccgataagttccgacatactgcaggcggtgcggcagtccttcaaagtctgccatgctctttaacacagcctctttttcgcatccaagcagttctgccacacgctccacaaactgtgcatcatactgattatgctctccggcaagtttcaattcataatgcacacctttgggctgatgaagcactgtcctttgcgcctttgtatcgatctgcggtacattttctcccacaaagaaataatctccgctcttctgatacgccgcaatatggctctttgcctcaaaatatttttctaccgttccataataatcaagatgctcctcatagagatttaaaaagattgcaatgtgcggtgacacattcgtatgtgcaagctgatggcaggacatctcataaacaataatcgtatcttctgtcacttcctcgaaataatcaagacaaggctgtccaatatttccaagcagtaacaccggtctgccgctgcatgccttcaaaacagtatagagcattgcagacgtcgtacttttccctttggttccggtgattcctattacctggtcacgaaactgctgtaaaaataattctgtctctgaggtatattttggattttcctcattcatcacaatgccaggactttttatgataaaatcgtaatcatcctcgtcgatctcttctttcttcccctcaaatatatccacggacgccggttttacgcatctctgcagaaagtgctctgtcgcctttccttctctgccataaccccagatcaaaatccgttttccattcaactcactgatgatgtccatcttaatctccattcctgcccgttccccagggcatctctattcctgctgtttatgcccgattcataaaatcctttaaaatctctaagaaatgctccggcacctggttttcggatacccactcggaaagcatctcatctaactctcccggagcagcttcgatcgtttctttatagcgctcggttaaaagactctttccaccgcgtgcaataaatgtctttaatgcaacaaggacttcgcgtctggttcccacgcactcaaacggtttgttctcctcaatgccggtcagctctctaaaatcaagatcaagcgaatctttttccaacaggttctctccgaaaatgtgcaccagttcttcctgtgataaaaacggagttaaaatgatatagacaaacagacatttcgggcagttgcagcaccagattccctgtttgcttcccgcattacagctccggaatacttcatgataactcttacattttgaaaacagccatgcaatctgcatctcagtgagcggacgtaagagactgaaataatggatatcggaatctgtcactttctttatatatgatacaaaatcctgctcaaactcaaagctctttgaatattgatggttgacaaaagaatcttttaccgtcgtctcgtttgcacttgtctcattcgaaagcacgatatagcggttgccactcaaaaatgctgaaataaaggatgaaaatgcaacgactgcagagaacggaatgtgtccgtttaaatatccctctgcattaagttctaaaatctttttgtcgagaatacgttttgcagcgtagtctccctgtttgtggtcacagactgcaataacattttttgtggtcgcattgccattgatactgtaagtagtaatcttttctccctttaacacctcaagggaaaccacggaatcctttccaccgccgacagacaccagacatccatcataggactgtgtgtcatgcaatggtgcgcacgctttgtcctcacattcgatcgtaacaagatcctcttttgaaaccacgattccattgcggtacataaactcgccaagtccgttgtaatataactttttccaccattttttctgttctgcggaaagtgttccacacaaaatttttaactgcttcgggcaggcacatttccagtagctgattgtctctgccattccaagatgaaatgcaagcgcctttaagattgtctcatccacgcgctcctttgccgggaactcccactttgactgaaattcacacagccccggtatctcaaaatgatacacgatccgatatgcactttcgatatactctacggaataatctttatataaaaaagaattgtattgatttctgaaatcctcaaactttgacaacgtaaatcctccattccggacgcgatacgccccagacctatttttattatatgaaatcatcatctgcgataaacattattacacagcagactctgaaatatcatagcacacatcctagcaaaagtcgatagcggagggacgcacaaacggcgttcaccaaaaaaggagtgggcatttcgcccactccctatacagtcatacaattaatttttcttgccaagtgttacagaaatcgtctgctcctgatactcaccattcgtagaacgctcaatcttcacatcaaccgttgtacctgctttataatactccattgtagatgaaagttcttccatggaaccaatctgttttccgtcaaactctgtgatgatatcacctttctggatacctgcctgctctgctgccgaacctccggttacctgtgcaacataaacaccagatggcatgttataagtttttgcaacatcatctgttacatcgacacctgcgataccaaggtatgcgctgtcagactcatctactttttctttcgtgatcagatcattgataatcggtgctgccgtattgatcgggattgcatatccaataccctctacggaagtatcggaatattttacagagttgataccgataacctcaccgtttgcactgagtaatgcaccaccactgttaccagggttgattgctgcatctgtctggatcagatctgcagtatagcttgtgtcactctctgaatcactgacagatacctgacggttcaatgcactgatataaccaacggttacagactgtccataaccaagtgcgttaccgattgcgatacaggaattaccaacttttaagctgtcagaatcaccaagtgtggctactttaatattattcatcgtatcactttcaatgctgcttaacgctacacggatgactgcaagatccgtagaaggaactgttccttttacctctgcgctgactgttgactcatcattaaatgtaactgtcagactgtttgcaccgtttactacgtgattattcgttgcaacataaagataattatcatcctgacttacgatgataccggatccacagcttgtgctctcataagtctgtggcataccgccccagaaactctggtattcggtctcgctcacatttgtgattgccacgatggacggcattacggatgatacgatgtcagatacatccgttgctacataattcgacgatgtggaagttgcctccaccttgttgtctgctttggtcagtgcattctgactgccgctgtctgatactgcggtttcatcattgccaaatgccttggacgatacaagatgtacaccctcaaatgcagtgcctgataccagtccaaagactaacgcgatggctgcgcattttgcaagtttcgttccaaatccacccggttttctttctctctttttcttttgttttttaccagtcgtctgtgcgttctgataaaatgcaccgttggtattctgatatccaccattctggtaagcaccgttctgctgatatcctgtgttctggtatgtgccattctgatatgcactgccctgctgatatcctgcgttttgtgaataagaatttgtgttctgataagaattgttgtactggtttacgtttccttcatttgcatgttctgtctgctgattgctctggctgccgttattgtatgaatagaaggaatccgaagacccattctgattgttgttgttataattgttaccatccataacgatttctcctttcgtattcggaatttcttttccttttctgattatgagtgtacagagaaattgtgttctatttgtgacaaaacaatcaaaaaattatgttttcttctcaaatataattgataacctgatatagcagattccaaacgccaagacctgccacgatagaataatacagatctctccatttcttacccggcattttaaatgccagaaccaatataataaacatacacatccaatccgtcagataataaacgcgcgcaccggacgcatagatcgtcggtgagaaatgcatgatcgcctcacttgcaattccgccaagccacaccagcataaggactacgttatgttttgaaactttccatatcaagatacaggtaaacaaaagtgccgcgatccaccagcacattgcaaaccagtttgccgcctgcatctcttcgatccgcggtacctgctccagccgtactgtaatatctgcgatatgaagaccacagtctgaaaacaccttgattccggcaaacggcagtaatgcagctgcagaaaacagtcctgcagccgtcatacatgccacatctgatgcttttctttcatttttacatataatatgcaggattcccgccagccagattccaaacagcaacaggcggttttcatttgcaaaagaagaaaccagccattgaactgtaacaaaaagatgctccccaaaagaaagttcctcatactgcggcatccagttctgtacttccgatgcaacacggatatcatttcccggtgctaaaaacagaatcacaaacgccacgaccgtcactgctgtctgtatgataagaagaatggttctttgcttttcatgctttctcagtatcaccaccagtaccgccagcacctcaaacgtcacaagcaccgccgccatctgttcgatcgacatacttgcgagaactgcgcagggaatggaataaaaaaaatgccaggtattatgatcccctgaaccaccatctcccgtgtcaaatacaatatctgcaaccggaaccagtgcccagatcccacaggtaaatgaccatgtataaaaaatggaaccgttgatccagattgccgcatatccaacggtcataatcgccatcagaagataaccgcttactactgcaaccgactcgcccggcagaaaattttttgtccggatacccgctgctttttctgccagtttcaacacgccgcatggaagaagcacaagcatcatggcatttacgatacgccagaaccagattcccagtgaaaatgcaatgtacaccattgcttccccggacatcctgccgacccacgtctgatagcgccagcttaaatactcgaaaaatcccatttcatgtgtatactgataaaaaaaggcatcgtcgccatcggaatatcccacctgtgtcaacaggaggaatgctccgaaaaacatcaatgcccaaaataaaacttttttagaagtctctctcataatttacctattcccgtctgatacttcctgattccacaaacgtttccagtactccggactcatcgtacattttaagatctgtttcctgctcagctttttataccgtttgccgagccggtaaccagcatactttccaacacactggattccaagttcaaagataagatacggctttccaattgagcacagatacttcatcgtactctttaccagcttcattccctccgcttccgaactgatctgctcaaagatctccggatgcatggtctgtgagacagccagatcaaaattgcggtgaaactgctgtcttaccgtatagttgtgggagtgaatgacttttgcttctgcctcatattttacataatatcccgcaaaaactgcttttgcggcaaaaaacatatcttcattaaaaataaccggtgattcgaatccgccaagtttatgaaacagatccactctgtaagccgcacatacatcggaacagaaaaacgtcttgatccccatttcttctatatccgcttttccctttttcctgctttcatccggataattaaaagatcttgtatagcgttccacaatgcggcagttttcattcggaagctgtcttgcataacagacagccgtatcctcctcttccaaaccctttaccagatttgcaaccagatttttatctgccggaaccgcatcctgtgtcataaagataacaatatccgcatcggaatgtttcacgccacacattctggtaccgccatgatcaaacatttctttgctgatatgatacagcgtatactcacatggaagtccacaaagactctgttcgatcggatacttttccacagcttctttccacaatttttcttctgtgtttaaaataatgaccctatgaacgacaaaggtctgctcctgcagtttttgcaggagcagacaaaatgtgtcatccggtctgtaagtcggtatgatcagatctgctttcattaatatccttctccctgatggaatccggtatcattgacaatctgagcactgttattcttgactgtatcggtcggtgcatattcattatcatcgtataaaaatacatgaagctgttttacattggattcaagatcacatggtacaacaacgcttcccttatttccaagtgttgtcgtattcttctcaaacgggaaacctattgtctcaccaaggctgtaattgaatacttttgcggcaagagaaatcagttctgtatttgaaaaacttgtcttgatatcaccaaataattcgtcgatcaggctgttgatcgtagtaagatttgccttctgcgctttctgtaccattgcagtaagaacagtacgctgacgttctgtacgcttataatcatctcctgtagtataacggatacgcgcatacgcacatgcctgaacaccatccatctctacatttgttccgccaccggataagtacttggaattatttttggtcagtttattgatctcatccatataaccatgcatcagcacagcctcttcatcagacacctccgggatcgtaactccgcccagaagatctacacattcaacaactgcattaaagtccactgttacataatcggtaatgtccatatccaggtttttatttaacatggtaattgcctgctccggaccaccttttgcatatgcggaattacatttcttaaaagtaccgcctccgatatccagataactgtctcgatatacagataccagctttaccgcatgtgtatcattattgatacttgcgatcatgataacatcactgttacctttggagagattaccgtttgaacggttatcaagaccaaacagtgcgattgttgtataacctgccatgatttcctgtgactccgaagataatccctcatttacctcgatatcttctttattgaagcttgtgtctttctggatctttgaaagttttaccgtaacaaacaacactgctgctaaaatcagcaatacaagaatctcaattacaacgataatgagtctgtttttctgcttctttcttctttttgacgctttgctgtgtgccccgtttcttccctgtactgttttactcataaatgttttctcctaatatgcatttttatttataaaacccttgaagacggtaagaaacaggattttaatatccagccctatcgtccagttttcaatatagtaaagatcatgttcgatccgcttgcggatggatgtatctccccgatatccattgacctgtgcccatccggtcatgccgggacgtacctgatgtttgatcatataacgcggtatctcttcccggaatttttccacatactgcggccgctccggtcttggtcccacaaggctcatatcaccttttaacacgttaaacaactgtggaaactcatcaaggctcgtcttgcgcagaaatctgccaatctttgtgatccgcggatcatctttatgtgtccagcctttgcgttcttcttcctcagtctgcacatacatggtgcggaacttatacatgcggaatggttcattatgcagtccgacacgctcctgcttaaagatcagcggtccttttgaagtcactttgactgcaattgctgtaagcagcataatgggcgaaaaaagcacgatacagatcagtgaacccacaatatccatacaccgttttacaagtgcattaaacgtgtttgacaacggtacataacggatattaataacaggaagtcccaaaagatcctccgtgtacggcttcgtcggaataatatttccataatccggaataaacttggtatgaactccggatttttcacattccgcaacgatcttctccagcttataatactcttcaagtccaagtgtgatcgcaatctcatctaatttattctccggcagaatataaagcagattgccaatacttccaatgacctttatccccttataagttgtccctctcgctatattgtcgtctaaaatccccctgacattgtacccccactgcggattctgctgtatccggtctatatactgctcagcggcacgcgaatatcccacaagtagaacatgcttaaggttatagccgtttttgcgtatcgtgcgcagaaactgacgtatcagcagacgtaatacctcttctaataccgtgttgatcgcaaagaaataaaagaacatctcacgtgagaaatttcgaaactgctccacataagactgcaggttgtacaatactgtaaaaatcaacagaaaacctacaatattcgccatcacgatattggaaaactccaaccgccgtccctgtaccctctttggcgcataaagattaaacgcataatacaagatcagatacaatggaatgattacgaccagtgccctcatgtaaaatcccaaagacaatgcaccgcccggtgagtccaaaataccgctcgaaaacttcagccaccatgctatgatatatgataccgcaatgacaaacgcatctatgatcacatgcagtctgttaaaatgctgttgattatcttttatcataatgtcatccttttttcattttcaagctaccataaaaataataatacaataattttccagaaagcacaacttctttttcttaaaactcttgtcacaatttcttaattatttctttattattctttgatgctcaaacgttttttcccgttatctgtgcgataatacgcgaaatatatttgtaatgagttcccactcaatttttacataattgcgaagatttccaaccttaaagcggacttttctgcatgttctgcactgcccgattccctctgcaatgccctctaaataacggcgtccaaatccttttttgcagaaaaacatccattttaccaaaacaccggcaaataaaaacggcagattgatcaaaaactgcagcaacggcatatttttatagatcacaaacatggaattgcgtgcggcaagaaatacttttttttcattgtagcgcgaacctgtcgtcgcactcccgacatgatacacttttgcctccgggatataacggttgcggtatcctgcgatccttgcacggtaaccgagatcgagatcctcaagataagcaaaatgtttttcatccatcacaccaatctgttttaacacggacatccggtagatgaccgctcctccacaacaggaaaaaacatccgtctgttttccataatctgcggcaggtctgccctttccacgcgcaaccgcccagcccggcagcgtatagagatcccccgcattgtcaagcagctctctctgtttaaaatcaagcatctgcgcgccacaggaaaaaatacgttccgactgccggattccttttaacagctcctccacaaaatgcggctctgcctcggtatcattgttcagtaagatcgcatatggtgttgttgtcatttcaaagccaaggtttaccgcaccacaaaatccggtattttccggcagtgcgaccatttccatgtccaggctctccgatgtcacgtccgtgctgccatccttagagccgttgtcgatcacaagcagtttaaattcctgacaggtctgccgttcgagtgtctttatgcagttttccaaaagcttttttccgttgtagttcggaatgataatcgtaacttccgtcatctatcctccattcagctgttatccttcagagaataattattataaaccgaagaaaaatttggattgtaatacggatctccgttttttaagataccgatccagtgatttctcatgtattcgatctcacgctggaaacgcgctgttttttccgatgaatcttccgccccgcgggatttcgattcataatgatatgcctgcacatgcggctcgtagacaactaatttcccgagtctgcgcaccttcagacagaaatccacatcattaaacgcaactgcaagctgctcctcaaagccgcctgcctgctcataaatctctctttttaccatcagacatgccgcagtgactgcgctgtaatcaagctggagggatgccttatgcatgtacccgctccggtccccggcaagaccgacaaacatgttatctccgatgccgcgcgcacttccgccaattccaactacgatcccggcatgctggatcgtgtgatccggataaaacagttttgcgccgacgattcctacttcttcccgcaggcagcttccaagcatccgcttcatccagtcatttccgatcatttcaatgtcattgttcatcagaaggtaatagctgccttttgtaaattttacaccgaaattatttaacttcgaatagttaaatccttccgtatagactgcaacacagatgcgctgtccgcctgcaagttttccctccatgcagcgtgttccatcaacggtcgttttctgcggcgcaatgtccccataataacggaaagtatcttcgcagctgttgttttccaccacaataacttcataattgccatacgaagacttttcgaccgcagcaatacatttccgtaaggtttccacctcatccttacttggtatgatgatcgacacaagcggctgctcagtcagaggatactccacctcataaaatcccatatccttcgtcggcgtcacgacagcatccacgccaaggcgttttaaatgttccccgatcgcacgttttcccgcatccactgcatactgcttggaaaacggattctcagaggtcgactctttgtggcatctccagtggtataagatccttggaatgtgcccgatcgcccctgcctgttccgcacagcggagaataaaatcataatcctgtgccccgtcaaaatcagaacggattccgccaacccggtcgagaagtgatctctttactgcaaggaaatgcgtgatgtaattatttgaacggagcagatcgatgttaaagtccggctttaaatgcggctgaaaatgtgtttttccatccatatcgactttgtcttcatccgtataaagcatctcgtagtcattaccggcttcccggtagaccgtcgctgcaagcccatcctcatcgtggaatccctgccggatcatttttaccatttcaaacagcgcatccggcgcaagcagatcatcatgatccataaatgcgatccagtctccgtccgccagtgcgaccgccgcatttgtatttcccgcgatcccctgattttcagtcagacattcatacttgatccgcgcatctgcagatgcatattcatttacaatactctgcaccaaagatgctttcggatccgcatcttcatccccggatccgcttccatccgcaaggcataactgccagttgccataggtctgcgcctgtacggactctatcatcgcgcgcagaaaagtttccggtgtcttaaaaagcggcaccacgatactgatctttggcgcatcgttccatttttctgcctgctttttctgtttctctatctgctccgctgtcgccttatgtttttcataccatggctcatacggaatattttctgcctccatcttttcctggagacggatgataaattctttccatccataatgtttcagatagcggaatcccttcacaactttctgaacggttattttctgaaaaattgacttcatgtttattttttcgctttctgatggatatagagccatccgtttgcgtaatcctttcgttcctcctccgacattgaggtgaatgcgtcaaaatccacctttgccagcgtcatctgctcgtttccacatttaaagcactccacatctttgcgtcttgatacgacacgcatccatccgcattctgggcaaataaatactttcatcataggaactgctgcctctcttctttcttactgcctatttgcgcagggaaaaatctgaattatccagtgtcaggttcggattataatacggatctccctgctcaatgatctctctccatgaatgaagcagtgtatccacctcgtcattaaaccgctccactttttccggtgaatcctcatatcctctggatttcgactcataatggaaccactctgcatatggatcatagaccacaagttttcctgttttacgcactttcagacaaaaatcaatgtcattgaacgcaaccgcaagttcttccgtcagtccgccgacctcatcaaacacactgcgttttaccatcatacaggccgcagtgacagccgaataatcctgcgcgcataaaattctgccaaaataaccggtatcgtaacgcggtttgccgataaatgcatgtcccgcggtcccgccaaatcctaaaacgactccggcatgctggatcgtctcatcctcgtataacagctttgcaccgacaattccaacatccccgcgcatacaataacctaacatctcaccgatcgcgccaccgtcgatcatttccgtatcattgttgaggagtaacagatacgaaccctttgcggcatccgcaccgaaattgttgatctttgaataattaaagccaccctcataaaaaacaacatgtacattttcacgcattgtctcaagatctttgtaataatcaaaggtttcctgctcggtactgttattttctacaataataaactcgatgttcgggtaagtggttttttcgagaatggaattaacgcatgtttctaaatctttcctgtgatctttatttggaataatgatcgataccagcggtttttccttccagtcatattttgtccggtacatcccgtaaaatgctgcattttccacagctgccggaaccccaatcctgctataatgtgcctctatcgcacgtcttcctgcctcgaacgcatacagcttgctctccggatttgcagccgtagactgcatatggcatctccagtgatacaaaatctttggaatatgtctgatattcttcgcattctcacaacatcttaagataaaatcaagatcctgtgccccgtcatattcactgcaaaatccacctgccatatccacaagctcttttttagccgcaaacaggtgacagatataattgacactgcacaaaagatcgagatcaaaatccggtttaaaatgaggttcaaatctcttttttccatccatgctgatcttatcttcgtctgaatataagacatcaatactgcgatcctgatttaaggcatctgccagttcatagagcgcattcgcaggaacaatatcatcatggtcagccaggacgatatagtcacctgctgccagtgcaagcgctgcgttcgtattgccggatattccaagattctttggaagtgttgtaaatgtaatccttttatccgctttcgcatactgctctaagagcggtgtcagctccgttacaggtgcctgtccgttttccgcagtccccgcatcatcccctgacagactgccgtccgctaagcataactgccagttaccataagtctgtgcctgtatggatccgatcatttcttttaaaaattccggttttgtccgatacagcggcacgacgacggaaaacaaaggctgataagaaaatgtccgttttctctgttcctcaagttcttctttttttacatcatatttttgacaccatgcgtcatatgtggtttccgatttcccccctaatttattttcgatcttgtggatcgttgcagacaatccgttccgctctaaatagcggagtgcatcctgtgatttttccagaatatactgccatctgcctccatcatcccactttcttaaccgggtgcgggagtaatgttctgcattacgcatttcaaggaaaaactttttgttatcatcctttcgcggaatcgacgcctggatcataaaccctggttttgcctgtatgtcgcattccggaaatacagagagcagatctttccggaaatagtgatccgtctttacctgaagcttctgtctgcggttatccagcagataaagattcacttctcctgcccccatacaccagccggtcaccgtcacggtgtcctcatcgcggtggcagttttcaatataatattccagtctgctttcccttacgcgcagttttccggttgaaacagcatacgctctttttttactttctccgtcatccgtaaaaatttcaaacttctttttttcacgccagtctttcggcagcgtcacgatcccgacaacttcctcattgatttcattgatcgtcccaagatatttctggcgaacctcagcacctttgtttactgtaagggcagccggcagcttttcgccatccagataagcctgaacttccctgccggatgcttttccgtcataaaaccagccgacgaacaccagcatatccggctcattcagatggaatctgagtttttccacaaaaaatttatgtgtatccatatgcggtccttccaatcagtctctgaaataaatgtctcttgtatacaccttttcttttacatctgacaacatgttatccatacggtttgccacgatcacatcactcatattacaaaactcatcaaaatcacggatcactttggaattttcaaacgtatctgtctttaatgacggatcataaatgacaatgttcacaccctttgcacgaatacgctccataacccctaaaatagaactctgcctgtaattatccgaatttgccttcatcgcaagacggtaaatgccgaccgtcttcggatttttctcaaggatctgttctgctataaaatcttttcttgtccggtttgcatcaacgatcgcaccaacaatattattcggcacattgtcatagtttgccagaagctgcttggtatctttcggcagacagtaaccgccatatccaaaggaagggttgttgtactgcattccgattctcggatcaagtccgattccctcaatgatctgctttgcgtccagtcctttcatggcagcaaacgtatcaagttcattgaaaaatgaaacacggagtgcaaggtatgtgtttgcaaaaagtttcactgcctccgcttccgtaaggttcgtcagaagtgtcgggatatcttccttgattgcaccctcctgcagcagatgtgcaaatttctccgctgcttttttcatctcactgcttccctctttcgaaccgacaatgatccttgaaggataaagattatcttttaacgcctgtccttcccgtaaaaactccggcgagaaaagaatacgatccgtgtgatacttctcacacacagactgtgtataaccgaccgggatcgtggatttgatgacaatcaccgcatgcggatttacctttaagaccagttctaatacttcctcaacggatgaggtgtcaaaataatttttcttttcatcataatttgtcggtgtcgagataataacataatctgcgttttcatatgcatgtacaccgtctgtcgttgcagtcagatccagttttgcatttgccagataatcctcaatctcacgatccaccagcggcgatctgcgctgattgatcatctccactttttcttctattatatcaactgcagtcacctcatgatgctgcgctaataaaatcgcattggacaaaccaacgtatcctgttcctgcgattgcaattttcatcgtattcctcctgcctttccattcaaaagtcaaaaatactccatattgttttatactaccattttctgtagtatcatgcaagtttgagattttaaccatgtctgcaatttacaacacgcctgttttttgctaatgtataaagaagcattgaggagtatttggaataaagaaaaaatggtaaacaacccaggaaatgaggatttttatgaagaagaaaaatttactgtccaccattcttttaattttatctgccctgctgcttagcggtgcagcatggttttcttatcagaaaagccggatggactctaccggccacataccggatcctgccacggaatatctcatcacgcagtatgcagatgcgaccggtgttcagggcactttttatacgatttcaaacgatgacactttgatcatcatcgacggaggctgggcaggcaatgccgatgctgtccggaaagtgattgcgaaacacaacaacaccgtagacgcatggatcatttcccatccgcaccaggatcatgccggtgcattcaatgttatatatgccaatccgggagatatcaccataaaaaatatttatgacaacggcttcgattatgatttcatcgaagctgccggtgaaccttacgatgatatcacggtcatggaaacgttccacgcgctgacgaaagatgccgataatctcacacatttaaaacgcggcgatgtgatcacacttgccggtcatctgacactctctgtttttaatgcatgggatgaatctgttctctctaatgtcggggatgaaaaagactatcagaacaatgcctctttgctgtttaagatcagcggggcacaaaacagtatgttattctgctctgatatcaaatatgatatgaacgactatctgcttggtacttaccggaacgatatctcctgcgattatattcaggccggacatcacggaaactggtcattttccgatgaattttacgaggctgcaggcgcctcctatgcctttatcgacgcgccttcctccatcacggacaacccggatttccctgccagtaccttaaaaagttctttgcagaaaaaaggaacggtatttgatttttctaccgctcctaattctgttactttgaaataacctgatgaaatgtcccggatttcgcccgattatactttttcaatataagttgttgtcaaacgtcaatttcagttgtagtgtgttgagttaaaaagataagaggtttccgcctctttctttttagttgctaaatgaattacttactcaaaatagtaaccaccagctgctgttacattttttgttccacgattttgtacaaatgcacgatattttcccgtctctgaaaccgtaaatgcatgtgctaatgcaccttttccctctacatagcgcacattgttgtgcggatccatgataccgatccaacaggtctgtgtactcggtgacgttgatgcagaaattacaattttctgtccacttgacactttaaatttaccggaacagaagcgtgttcccggttctactgtccagttaaatgataccgtctcgttggcattcaaagatggtgcaaccgggttgaaatccagctttgcatatttgatacgtgaataatcattatcctcggatgcagaaacatacacttcttccaatttcatctcacttgataattcgccctgcataggctctgactcctgatacaattcgtcatgcacacccgctgctccgtaacttgctgcataggttgtggtcattgaagttaccacaaataaaaacgacagtacaaatgctgatattcttgcccctcttttggctttcacatattttttcatatactctattctccttcccaaactctgctggctctcatatagggtagaaaaaatataatccggctttgaattctccggcatgcgctccatcagatctacgatcacttcaaaataacgtctgggcgttaccacatcacgcaatgcgcagactgccgacacgtcacaggcacattcactccactcattgatccacggcaaaatatgttttgccccggaggtcatatgctgcatcgcaccgatataaatgctgcaaattttaaagaaagggtcattatacttacaatgtaccagttcatgacaaaagatcaccgtcagttcttctctactgtagtgatccttcggtaataagatattatattggaatactcctgtcaccatcggactctgaatcgaactgctataataaattcctatcttccgatggatatggagcatatttttcactttcagaaactctgcacagacctgttcatctgccacaggtattctgtatctgcaaagtcttttccagcgaataaattcaaccatgctgtctgcgacatttttgatcagaaagaccagccagataattccggctatcccaaacacgagatccatatctcctgccatctcaaaattaggtttccatatgctttccgcccgcagatatccacgccaggtcagcctgacgatcagataaccaaacggtactatgtacatcatacatacaaaccgcaaagtcgcatataccagtctgggatcccgtttcagcaaaagcggctgaaatactctccagaaccccagactgaccgtacctgtaaaacaggcaatcaagataatcaaaaatatctgactaattaagttcatctaattttttcttgagtacctgaacctcttccttggtaagcgcatcctcgcaaagatggcaggcaaacgcagccatatctcctttatcaaagaatcttgcgttctcctgtacggttgctttccagaaatcttccttgcttactgcaggctgatagaatgaatatcttcccttgcggtaaactgttaaaaatgatttcttaaccagtcttgccagaaaagtagaaaccgtctgtggcttccagctttttccgttctcctgatttactctgttcatgatatcctgtaatgccagatcctctgttgaatcccagataactttcatgacaagtctttcgcatgctgaaatatcgttcgtatccatgaaccaatctcctttccactcgcgcagtgattactacgtccgtaaacaacatatcatttttttatgttgttttcaataatttttttatttttttatgtttttcccaacaacagagattctctttatcaatccccctgttttccaaagaaaaacgcatatacatgttttattataaaacattttcagccagaatgctacatttatctttttttattcagacaaaattcatacttttagcctagaacctgctcatcatcacaggtaacaccaaggcttacctcgatcagccgcagatccgatccaagtgctttgatggaatgtttcttgccggatgcaatacttaccgtagaacctgcaagcagatctacttccgttccctcaagaatcagttttcccataccggaaataacggtgatcgtctccgtatgctgggcatgtgtgtgatatggcattgtcttgcctgcaaggatcttgatgcgttttgtgacgctgtgtgtgccgtcctcgtcgttgttgtcgatcgtcttgatcgttccccagcggcgctcttcaaatcttgactcatccggaatattttcaaggcagtctttgatataggaactctggtgtttgtccgctactaatattccatcgtgcgaagcaacgatcaccatattttttgctcccatgactaccatcggaactccaagcacattgattgcatggctgttctcacaggtcttatcccatgtcacatcaccaatgctctgctctttcatttcctcggtcagggtattccaagttccaaggtctttccagatcccgtcatactggacagcaacaatgtttttccagtgctctaacacctcatagtcaaagctctgtttcggcagcttttcgtaatcggcaaccatctcatcatagtttgtcgtaacaccgtatttatccagccactgcgcagccatgtttaatttgaaacagaacacaccacaattccagagtgcacccatatccacaagttcctgtgcggtcgcctcatccggtttttcacggaatccttttactgcaaacggctcggatccgtttttttcaggaacgatatatccatattttgtggatggataggtcggcacgccgccgagcagtccgatcacactgtcctgtttttcaatatattcacccaaagatttgatcttattaaaaaattctactgtagtgtatggatctaccggcagaaatgcaaccacatcatccggctttgcacccttgtttgacaaaagataggcacaggataacataacagccgggaatgtgttgcggcgcataggctcaaccgcaacttctgcctgtccgtccaactggctctcgatgagctccacctgggaatcgcttgcacaaacgatcgtattttcggaaagagatgccgctttcagctgtccaaagacacgctgtaacatggaacatttttcggtgctttccgaatgttccgcttcatccgggttcattaacttaatatactgcttggaacacagatcatttgataacggccagagacgctttccggaaccgcctgataataaaacaatatacatgttgtttctccattctacgctcttagcgctctgcacgcatcggattgtgcaggaaatcatcataagtcaggcggattccttcctctaactctgttttatacttccagccgagtccctctaatttgcttacatcaagaagttttctcggtgttccgtccggttttgtggaatcccatttgatctcaccctcatatccgactactttggcaaccagttctgtcagctctttgatggtcagctcttttccggttccaaggttcacggtctcgtttccgctgtaatggttcatcagatatacgcaggcatctgcaagatcgtccacatagaggaactctctgagaggtgtaccggttccccaacaggttacctcttttaatccggcctcttttgcctcatggaaacgacggatcagtgccggaagcacatggctgtgctctggatgataattatcgtttggtccgtaaaggttggtcggcataacagaaatataatcagttccgtactgacggtttaaaaactcgcagtattttaaaccgctgatctttgcaagtgcatatgcctcattggttttctccagttcacttgtcagaaggcagctctctttcatcggctgtggagccatacgcggataaatacaggaagagcctaaaaacattaacttcttacatccgtttttccatgcctcgtggatcacgttcatctcaagaaccatattgtcatacatgaaatcagcgagtgcttcactgtttgccatgataccgcctacttttgcggctgcaagaaacacataatccggtttttcttttgcaaaaaactcctccactgcatcctgacggcagagatctaactctttgtgtgttcttgtgatgatatttgtatatccttctttttcaagctgacggacaatcgcggaacctaccattcctctgtgtccggcaacatatatttttgcatccttttccatgatcttattctccatttctgtctgtttcccaagacataacaagtttgagcgtaagcacaaacttgtgtgtgaaaaatcttatttttcacacttttctccaaatgttatttttcgttttttacaagctccatatcatgcgctaccatgatctttacaagctcctcaaaagtagttttcgtcggattccagccaagctctgtctttgcttttgcaggatctccccagagatttacaacgtcggtcggacgatagaactccggtgaaactttgataacagtctttccggttgctttgtcgataccgacttcatccataccctcgcccttgaactcaagctcaatgccagcctcgcggaatgcgtgctcacagaactcgcggacagagtgctgctcaccggttgcgatcacgaaatcttccggtttgtcgttctgtaagatcagccacatacattcaacatagtcttttgcataaccccagtcacgcagggatgataaatttccaaggtagagcacatcctgtttgccctgggcgattcttgctgctgcaagggagatttttctggttacgaaagtctcaccacggcgctctgactcatggttgaataaaataccattacagcagaacatgttatatgcttcacggtactcttttacgatccagaaaccgtactgttttgcaactgcatacgggctgtatgggtggaacggtgttgtctcgcgctgtggaacttcctctacttttccatataactcggaagtggaagcctgataaatacggcaggtcttctctaatccacagatacggactgcctcaagcactcggagtactccggttgcgacaacatctgctgtatattccggcacatcgaagctgacaccaacatggctctgtgcagcgaggttgtagatctcatccggtttaatgcttccgatcagacgtaccagacttaaagaatcagacagatctccgtaatgaacggtaaaattcggattgccctctaaatggtcgatacgctctctcttttctacggaagaacggcgtaccataccgtgtacttcatatcctttttctaaaagaagctctgcaaggtagcttccatcctgtcctgtgacacctgtgatcaatgcttttttactcatttcatctctccttttatgaattctatgattattttgctaacatcaaaattttaagccgttgtatagattaatctaatttttttgattttgcaattgaatatattggtctaaaatagtattatattgctatgcaaaaattattttttgaaaaatataaaacctccgaagttacaaatacgcgaagcgtcatcaataccccctccgcatttacccgcaaaaatttcttccacatacaggaagctggctatttaaaaagcctgaaatcacatttaagcaggcggagcgagctgaattcctacctgttttttgtcgtgctctccggcagtggcgaggtcacctaccgcgaaccgttatccgaaggcggaatgatctcttcaacggcgcatgcgggtgactgtttttttctcgactgttccggggaatacacccacatcagtacggatgaagatccatgggaacttctctggatccatttcaacggtcccgaggccagggcatattatacctatttcagggatcaccataactggcatttccgctctgctcatttcacagaactgatcaacgcaatcgagagtatcatccgctacaacgaagaaccgaccgatgacaccgatcttttaactgcccagcagatcattcatattttaacgctcatctgtaccgagtctaatgaaaaaaatgaactgctctcagataaacttaaaacaattctgcactatctggacgaacattataccgaaaatatctccttagaccagcttgcggaacatttttttatcagtaagtattatctttcacgggaatttaaaaaggaattcggaacgacggtcatacagtatgtgctggcaaaaaggatcaataatgccaaggagctgcttcggtacagcaattcttcgattgaggagattgcgcacctgtgtgggatcgatgatgcgagttattttaataaggtgttccggaagatggaggggtgtacggcgtcggagtaccggaaacgctggtagaagtgggtggctcggacgcctggaaacggctgggtggaatttgcagtaaatggctcggacgcggggaaacgcctgggcaggattacaaaagccaggtgggtgggagggttttataagaaggcacgcttgcgctgcgtgtcgctcgcaacggtactaagggagcaaaatacgctccctaaggaccggcggctccccagcaccttcttttaaaactctcccgcccacctggctttacgttatgttttcgataggcgtttcaccgcttcctatctctactttggctttcgtcgcaggcgtttcattacgacatggctctacctggttttccccgtaggtatttcaacacgatctgattctacctggtttttcgacgcaggcgtttctttaaccggttcagtatttctgaaaacgcaaggcatcccaggacggcggcggtaatgcgcagtgcatgatacagaacaaatggtacaactgcgccgcccggcacaggaattgcgataaatttggatgcaatacgttcgacaacttctaaggcaaagatgtggaaggcgagcaggaagatcgtattttttccgacgtaggcgatgaatctgcccggtgccgtattttcgatcagtttgccaaaccagatgcagagcagtgatccggtgagtccgacgatgatgaaaaatgggacgctgaatgctccgtagatgccgtattcgcggatggacatattgatgccgggatcaagacagcttgtcaggatgtagatgacaaataccgctgcgattaacggaatgttccattttttttcgaagaactgtgctctcccaagcagggttcctgcaatcatgaagatggttcccacgcaggcaagatcgatgctccatggaaggagtaccggaatatctgcaagtgccattgtgatggcagtcaaaacgatcagtgtaccgattaaaaatttccggtcagaaaggcagcggtcaatgaccagatgatagacaagactcgctgcaaaaaatgcggtcagataccacatggcaccatttgccacggtaaacaaataaacgttatccttgacgactgtcgtgtcgtacaggcagtatctggaatagagtattccaaatgcagatgcttttgtctccgcaagtgttcttcccatcagcacatagactgccaaaagcactgcactgtatccaaaatacgggatcagaaggcgttttgccttgtgttcaatattttctttgtaacttcttccctctttataaatatatcccgaaaccacaaaaaacagcggaatgtaataattgatcagaaagcggctcagcccgcagctgtgtgagataatgacaagcaaaagtccgaatccccttgccacatccagatattgatatcgtttcatttttgctcctgtatccaatcctgtttaatcagtgcacgctcccacagatacggctgaatccggttccagatgtccgccgcctgatggaacgaagcatttttacctgcaagaaaatcagaaagatcactgcgtaccttcgccggatcatcgatcagactgcagtttgcaaagtctgcggatgccaccgtatcctcaaaaaactggcggtacggtcccctcatccagtcaagaatcggagcattaaatcccagcttggtacggcggtaagcaatctcttttggcataaaagctgcgcccgcatcacggacgatcgatttcgaaaaacctccgtgcagttttgaacgccatccaatggaaaatgcaaactctacgatcctgtaatccagaaacggcatacggatctcaacgcccgctgccatgctgtccctgtcatagttgcgcagcagtgtcggcaggatcgtctcatgtgtggagacaaataatgtcttattaagattatccagacggttccagttcggatggtcggaatacgcactctttacagtttctttaccaagcagtttttttgcatggtattttaacatatattcgcggtagagtctgtttctctgctttttaaatgcagctgactgctgactcactccgtcttccgcatcctggtttaaatatgcggtcgtgatcatgtcgatttcttcttttgtctttgcatccgggtatgcttttaacacatcaaatccatatcccgcaaacagctcatccgccgcatgtccgtcaagggaaacagtggttcccatctctctctcttttttgtagagctccatcatcggcacctgtggattgccccagagttcttcaaaacagtaaagctggcgcaaaaactcacgctctgaaactgcggaatcaatgttcataaaggtatggctgattccaagataatccgtcacctgttttgcatattttgtttcatcctgcgccgttcccggaaaacatgccacataagcgtgctgccagtcattgttggcgcgctcatctgtcatgtttttggaaatataggacattgcgcagataacagcggaagaatcaagtcctccggaaagtccggtaccaagtgtcacatcacttctcatgcggatcttgcaggcatccagaaacaattcgcggaactgctctacctgttcctcataggaatccggtacgctgatcagatgatctaaggtattccagtagcgtttcagtgtaatctttccgtcttttacccatgcattgtggcctgccgggaaccgtttgattccacggatcagacactccggctgtgactcataatgattgtctgcaaagtagcggtcgaacatcggcttgtttgcttctaccttaggcaaaagcggcagaattactttcatctccgatgcaaacgcaaaaccaccatccggcagttcggcataaaataacggttttactccaaaacggtctctggaaatgaaaagctgttttgtctgtttatcccagatggcaaatgtccacataccgttgaagcgttccacacaggattcaccccactcacaaaatgcagccatgatgacttcggagtcgctggcactgcggaacgtatatccctttttcttaagctcgtcccggatctcgataaagttatagatctcgccgttaaacgtcatccagtaacgctcatttgcataggacatcggctggcttccggcattggaaagatctaaaatggataatctgcggtgtcctaatgtcacaccgtcctcctgccacagtccgtaaccgtccggtccacggtggatcatcgtgtttaagcatttcatcgccagttcccggtctacctttttattgactacaccgtaaattccacacatactaaacctcgtttctgatataaatatttatgaatcaaaaaaatttgaaacttattagggaattaaattgttcacaactttcatatactaaatttaaatttcataattatttccgatgaatcagccacagataacgtgtattcgtgaccagataacgtttaaacaatctcttcggatcctgcagcagacgatataaccattccaggctcaatttctgcatccagcccggcgcacgtttaatgtttccggcatggtagtcaaatcctgccccgacaccgatcatcacgccgtttacatggtccttatgagcatacatccatttttcctgcttcggtgctccaagtcccacccagatgatatctgctccggatgcattgatctggtcgaccatctctttatcttccgcttcggacaactcgcgaaacggcggtgacaccattcctgcaatctgaagatgtggatatttttctgccagtttttcttttaacagagcaagcgtctcctcactgctcccgtaaaaataatgtttcagtccgttatcacgtgcaaataatgcaagcatcagatccggtcctgtcacacgctccgcctccgggaatccgtgttttctgctgtaaccggaaagcggcccgccatccggcagaacaaacgcggcatctgcctgtaccgtgtgatactgcggatcgtcatgcgccatcacggtcgtgtgcacatttcccacacagatatattttccccgcagctgctctatattctgctcgatcagatttacggtcttttccatatccgtcacaaggatatcaaggcctaaaatattacatgttttcagttccatattttttccctgcttcttttcttcctgccattttcatgctgtaaacatcttagcagatatttatgattccttccggcataccgtctcaagcggtatattccctatatacgatggaagtaaactgaatgtactgttataacttcctaaaatttttctgcactttgacagtgcgatcatctccacaaatgcttcctcgattccctctttcgaatcgcggtcgatcacatccgactgcgggaagatcagctttgcatccggcagtaattctttcaattccctgcgtacctctttgtcatctgttgccacaaaaaaacttgtttctttatccgcttccagttcttttttcatgcgcccggcaaacaatgccagcggactgtttgcgatcgcatccgtatggtcagtccttctcacatgtacccccacacaatttccagtcagttcacgaaacagatagtcacctttttcttcaatgtttttgcctggctttaaaaaggaataactctctgccccaacctcgcagatcggcccaaatgcttttaaatagatgaccggggtctgctcgatcaggtggaatagtccttcatacccttccgtttctttgacctgttccacatcatcacactctaagaaacgatctgccatttttctccatttcttttttgcatgattcccaagaagctgtgccaccggctcattcttaaatccattttcgctgatctccaccacctcaaacggcagatcaaacagctctgaaaaacggatgttgcatccgacttcacgtttccacatcacgaccagcctgcggtttaatttttctgccaccgcataagcagaacccagaccaagcagtctgtttccaagccctgcacacggctctatgattatcatcggttcactcatacgctttccttttctttccttgtcacactgccaccctctacctgatataccatgtcacaatttttgatcgtagacaggcggtgtgcaataatcagcattgtcatcttaccctgtaagctgtcgattgcttccataacagcagcttctgtttccgtatccagtgcggaagttgcctcatccagcactaacacttccggtctgcggtatagcgcacgtgcaataccgatacgctgacgctgtccaccggataagcgtacaccggcctctccgatcatggtatctaagccctcatcaagggattttacaaattcatccagctgtgcctgttttaaggctgcccatatttcagcatcatcaatactttttaccttaccaaacgcaatgttattgcggattgtatcgtccaacatgtagatagtctgtgggatataaccgatcttatcatgccatccacggtaagattctttgatatccataccatctaccgtgatctttccggcctgcggttttaaaacacccaggatcaggtcgaccatcgtggtctttccggcaccggacggtccgataaatgcaacggacttgtttttcgggattgtcacattaacatgggctaataccgcatcctcagtatccgggtaatggaaggtcatatcctcgactttgatttctttgtctaatgttacttttttgtaattttcttctttttctgtctggatctccatatcgcggatcgcagcatactcttcaccgatcttgtggatcacgacaccgttatggatgatcgatcctaaatattcagacatcttatttgcagaaggaagcagggcaaatgctgctgccgcaaatactgcaagtgttccgacaaactgctccgggcttgtggatgtcgcgttgatacggacaatgattgccgccataagtcccgtgatacagagtgcttccatgatcggtttcggaatggaacttaagaaagagttctgtttgatgacataggtgtaaagaccattctgctttacaaattccccttcaaaatatgcctcgcggtttgcgatcttgatctctttgataccgccgaacgcctgctgcatacactgcaggatattggcgttgtattttcttctgtcatcaccgaaacgcgctaaggttcggcgcagttttttcataaagataaataccataacgaccatcgcaaacgcaacgcctaaggtgagcagcgcatcttttactaaaagatatcctactaagatcaggctgacgcagagttctgatgcaagctggagcatatttaacaccgccgcataaaacatctccggatccgtattgatatcacgcatcagctcggcactgttgtggtttaagaaaaatgtgtaatctctgctgatataatatttcatcatgcggtcctgcatctcgcgttttccataataggagaagcagtacagcatgttattgataaaaatgataaacgcattttttgcaatatacacgataatgatcagcaccgagagcagcgtgatcagctgattggtattctgcatgtgaaatccatcataaacagaacgtatgatgtcatttttcaataactgttccggattcattaccgctgtgataaacggggataacaccgaaacaccaagcaggctgacaccggaattgatcagtatcagaaacatcattccgacaagcttgcgcttctgctttccatcaaaaacttttagtacactttttaccaaatctttcattcttttacctttcttactttaaaataatccagtttttctgccgcatccgttcgcttaacagatcatccggcataatgaccgtcttatccgggttctgattcagataagctgcccatgtcgaaaacgtactattggacaatatctggttctggcatgccgccatcaggaaaaattcatccacatccgaaaattctcccatctctgagacaaattccagcctgttttctgcctgtcccactgcgtcttttttctggctttccagcacaggggcaagcgcttcttctgcacgctccatatcattggtaaacacaatatagcgtactcccggcttttcctgttccatgcgttccatggcatgtttaaaataggctccggcaggtcccatgatatcaccgcctctgacatgcacggcacaggtcggcgtttttttgaactcttcctgtaatttttttaccgtctcactctgctcgtaagccggcgtcatcatcgcagtgatctcatctaaataatcttcaaaataggcaaggtgctgccagtaaccatataaatatttatttcgaagtccttttttcttataaactctcggatcgatatcattcacatcataccggtggtcacggttatggtacacctcgcgctctttgatcacatgatattttaacgcacgtcttaagttcttgtaaatcttctgtcccaaattacggtttggaaatgattcctttttatcgtatttcagatgaaacttgtccagttcaaaatcccgcagtgtagaattgtcacattctgaaatatcaagaaccagcgaatcgccatcccgccttgcctgggcatatccgcaggcataattaaacagctggtttcccatgccgtctccaatttttactgcaatcattcctctgttacctctcacttttcctgtgtcctctggtgtttccctggaaaatggattttttctgaaagcaatgccatttcctttgcacagcagggcagcaggataaatacatacggatacacatactggcttttggcttcccatattatatgcaaaagaaatccgcctgtaaaaaataaaaaaatatagttacaatcatacttcctgtttcttcgatccgcaacaaaaattgttgcaagaacaaacagcatgatcacaaatcccttcatcgccagggcaatctgcggttctatactttttcccgaataaagttcattaaaaaactctgtcttattttctgcccctgcatccggcagcgggccgctccagagtgattcatacatcggatcacaccacatggattccagtttttcggagaaaaactcatacgcagtatccggattatgccggaaaatataaatattatccctgatctttgctttgccaagctctgttgctttctccgggtcatatcctgcttccgaaaagagccagtccgaacagccgttataccagcctgctgcattattgtaataaggctccgttcccattgcaatccataaaatctttggttttccaccacagagtacgccacctgtttctttgttataccacgcatggaatgcctttccaggaagcactgacacaaccatcaccagaactgcaagtaagatcagcctccattttttttcttttaagatccgaagaaaacacaatattgcgatcgttatcgatcctataatattatttcctttcaaaataactgcaagcattacaaaaatgacacacaatatcatatgcttccagttgccgctctccaaagatttatccagaaacaaaaatgccagaagtatgaaaaacaatcccggaataattccatatgcaaatgccaggaagaaaaactgtggcaaaaataaaaatgaaaaaagtatcacatacagatttgtcttgtgattttgtccaaaacaccggtctgtcagcttccagatcacaaaattgatccctatgatctgcaggagattgaccgcatataaaaagcgcacatccgtgctgataaaaccaatcagatattcataggtcacaaaacttaactgatgttcattcagatagatatcctgtcccggatttaaaaatgaaaaatcatgctgtctcataagcacagaaccgttatgtgcactgtacgcatccatgcgcaattccgttgaaacattcgcaatccagtatatccctgcaattatataaattacagtaaatacaataaagagtattttttcatcaatcttttgaattttagatcctgcgatcaaaaataccacaaaaatcagaactgcgagcaccagtgctgtgatactggtgcgctctatgctcacatcctccgtccacacatatgccactttcgaccgatacagcagattcaaaactgctacaaaaccgacacagcaaagcatcaccagccagattatattctgacaaaaccattcaaacagctcaattactttttttatcttttgcatatacttcatattccccgtttgcaaatacctgttgataaaaattttcttttacaaatattaagaccacatttgttttttcagactgttcatccaatgcagttttattaaaaaccacaagtggcattgcttcctgttcgctgcctgacgaaacagactcctcaagctgctgctctatctcttctgccgtgatgtaatctgtctcaatccagccaccgcatccggtaatataaggagctcttccggtcagataatgtaagattggaattgcaccacaggtaaccatcttatcactttcgctgccatatgactttataaagtttaccacttcttccatcggctgtacaatatccgtatcatacctgatgccgcgcagttcatcgagtgtgaactgctgttttggctcttgatcttttaaatacgcctttgtcatataaaaactctgtgatgcagtcagacccacacaccatatcgcacagatgacggtaagaagtcttcccgtatttcttacatccggcagcttgtgctctgtctccactgtttcttcagtctgtctcttcgcctttttcattctgtctccgatacagattgcaatatatggcagtacaaaaaaagcttcattgcacagatgtgtgatacccacattcgatccaatcggcatcagcactgcaagcatcccggatgcaaatgcaagggttttaaattcttccgaagcctctttgtcttttaaaatcagaacaatacatacatagagcatcgcctttatcacagctactgcgttcaggtaatctccaagcacgcgatacagcaccgataatcctgcgatctgatctgccccgaaaaccgcacctgccaacaaaagaacagccactgcaatcataccatatccgataagcggtgcaaggcttttcactttttttgccacaagataaatgacatacagcacggcaagcaataagattccacgcacggttcctttgaaattgatcacaaccatgttaccgattgtatgtccgtcatttgaatttcctgcatagaagaacatatctgcaaccatctgaaaataagtgccgatcccgcatgttttatacatgagaaaaagccctgacgcaaaactgctcaaaacacccaccacgcaccataacacctggcgtacaaaatatgccacatcttttttccggtaaaaatcataaaaaagaacgataaacacagcaaattgcaggatggaagatattttgcagaaagccgccagcatgaaaaatgccgatgcaaaaaagagcatcccggactttttgtcattgacagcccggatcaggaaatacaatcccgtcagtgccataaatgccactgccgtattataaataaagaaatgaaaattacattttgcaagcaccatggcaaacgcaagtgccggaaggatcagcgcatcttcccggtatctcacatagagcctgtaagataagaaacacaggtagaagcagactgccgcccatgcagtctccatgccaatgtaagccggtatatgcagtatcccaaacacttttaacaggcatccgcccaaaatgtttgtcaaaaacagcggcagataagtactgtccatatctgtaaaacaaaaccggtactgattcatgttaaatccgacatcactgacatcaatactaaaattccatcccgacgacgggagcagcggaatcagtgcgatcagaatgatccagaaaaatttatatgtccgtttcataaaatctccattcctgcattattttcacactatgctccaaaatacagcatacctatcattacaataccataaaccacacagagtgccatcagtaccctgtcatgtaaaaggacctccacaggatctccctccgaatttccctccaccgtcagactgtacttcatacagatcaaaatcacgatcggcaccgtccacattgcatattccatgccggcattggtaatatccttacaccataatgcataaaatgtattgagcagtgccaggcacatatacatatttttgtccaggaaatctctcgtataatatttaagcaccttgcgggtatccccgtcctttttcttctgcagctcgttgcgtctttttccaagactaaaataaaacgcaccggaaagtacagtcagatacagccattcagacacttccgtccctgtcaggaccgcaccgaaaagcacgcgcagcaaaaatccggaagcaagaattgtcacatctaaaagcggtacatccttaagtcccatactatatgccacattgataaacagatataaaattaccagcgcataactgcccgctgtcgcatctgacaccacaagcagtaccactgctgcgatcagaatgaacaccatcagcactactgcgtgaaacggtgtgactgcgccggatgcgatcgggcgatttttctttgtcggatgcatcctgtctttttccgcatccctgatatcattgatgatatagaccgcagatgtgaccagtgaaaatgcgatcattccaagcagtgttgccgtaaacttacgccggtctgtcagatttccactgaaaatcagtggcataaaaatcagtatgtttttgatataatgatgtactctcatgagatataaatactttttcatccaatcgttccttaatttatttcataatcagacagttttacaataatcgtatcgtcaatcacctgaatagatccatccgccggataggatggcatttccctgacaacctctctctgcatccagttctggatctcctcataagttccataatatggcgaaaatccaagataatcagacatcagatacagcaatgagttatatccaaggttcgtatctgcttttcctccaacggtaaaagtatcaccgatcagacttcccataccattcgtactgtcattaatctgtgtccccaccacgatcaccggcttgtcctgcgaataatcctccacactccggatcttggtgaccagcgtctgcacataggaaaaatcatgatatttcgtatattcaagtgccatgtaattgccatttgcgtaccagacaaacacgattaccaatgccgccgtaagcaatgcagacacccagtttgttatgctctttaccggagcatgcagtttaagattccggaaacatgcatccagccacaacaggaaaaatacaaagaaaaatacaactgaatatgccatcagcgtatagcagtaggaattcggtgccatcacatagatcaaaaacatcgctaccggaaacaccaatataccacacaaaacaattaccttatttaaatattcttttttctttaaaaccagataagcaccaatacctgctgcaaataagatccatacaactttgatcagacgtcttacggtacggttatagctgattcccataacattggaaaatcccagatcaaaaaatgaggtgtaacaagattttaatgcactaataagctgtgcgatcgtgatctttcccattgtatcgccaccctgataactggtaagctgtatatgtgtgactgcaagtaccgctttattgatcagaaaataaaccgcaacgccagctgccatcaccactaagaatctggcaatcataaggaaaaactctttccattcctttttctccttcacaccgccaaatgctgcttttaagatcaccactataagaagaatgcacacggtatccgggaagtatgcctgatatacgccaagggaacatgcaatcattaccactgctgctatatttgcaatgatatttttcggatatttcacagtgagccacgcagcaaacacactgaaaaaaatgcctattgcataataaagtgccagaaacataaaaaagtacatggacacaactgccggaaatactgtcataagtcctccgatcagccccgcagtcagtttgtttcttacctgaaatacagatacgaccattcccgctgataaggcaaggaacagcagtgcaaagattccattaaaaaaaggcagtgaataagaacctccaaatacagaacgcataaaacgccccatccagtttaacagccatcttccctgttctgtgcttaatccgatacctcctggtgtattcgcaagctcatcataattgtataatttattggtgaactgatacaaatgagctgcaagccctgctgcaaaagcagcataaaaagctgtctttaccgctcccgaaagattccggtaccactcagtcagatactgatccggcattttccatctgatcgtattcatatcttctcctttttctatttattattttcctaacttcatataatctttattgtatcaaaaatgtataggacgtgtcaaacagtagattcccggcaccattccattttccttgacaccacaggaagcattgtttatgatgtttatatctatgtactgtgaccagaaaggagtgttcttaagatgggtacaatcctcggagcctcttattatcagttaaaatactgtctgcgtaacaaactgcggcaggcaacaggtgacccggattttctttaccggcattatgtcggtaaacctttttatgatacggatgccttaaacacatacacggcagaactcatcaagtccggcagaccatttatgatgggccgctttggtgccgttgaacttttcaatatgcgtgttgccgaatttcatatggaaaacaaaaaagagaaagcctgcgaacagctttttacctgcgccggttttttccccaatgatacatcccttctgccacgttttaacgatatcatgaaggacgcctgccggcagaccgatattttaggtttatggcagaatgcctgtgaggattattacatccgcagatactgtaacgatctaagcgcaacctgccggctgatctctttagagccatggcgtagcaaaaacccatggtctgctgcacttgccgggaaaaaggtacttgtcattcatccgtttgaagagtcgatccaggatcagtataaacattttgacaaactcttcccaggcacggatatcctgccggagttcgaattaaagaccttaaaagctgtacagactgctggcagcgctgtagatccgcgtttttccacatggtttgacgcacttgactatatgtgcggagaatgtgaaaaaattgactttgacatcgccctgcttggctgtggtgcctacggctatccgctggccgcccacatcaaaaaaatgggcaaacaggctatccatctcggtggttgtctgcagatattgtttggtttaaaaggaagacgctgggatgaagaagaaccggatatcgtcgccatgtataacgattactggcattatccgatggcaagcgaagttccaaaaggaagtggtgacgtggaaggcggcacctactggaaaaaagaatagctaagggggaaactattatgagcaagatcattcctgttatggttcatcacgaaaccggagaaaaggctcaggctgcggggaagaagaaccaggaatacttaaaatactgtatcgcacaggcaaaaaaatataatgaaaaagttgttttgctaggcgatgaatataacaaagcgtggtgtgacgactggcacaatgccaatgacttcattaccgaaaaatggacaaaatttcatgctgtctttgagaatctttccacatatccgaccgcatgggcagagggcatctttaagcgcttcttcctgatactggaatacttagagcgcaactcctttgaggagtgtgtcattatcgacagtgacgttctgctttacttaaatgtcagtgaatatgagccgttccgtcactgcaaagtggctgctgaaaccccccttttacaggattttgcaatgcttgaaaaaggaaacgggctgaaatggaaaacctgtgcaggattttcctattttaccacacagggacttcgcgaatttacggatttctgcatcgatatgtatgcaaatcacaaagatttcctgatgaaaaagtgggatgtccaccgcaaattcggcatgtacggcggtgtcggcgagatggcactattacatctgtgggtttcttcccttccggaaggggaatatttaaacctgttaaaggacgatgcggaccacggtgtatttgataattccgtgggtgaatcttccggttacttagaacaccagtatgagtatatcaaacgcttaagcgtaaagaatctgcactgggaagatggcagaccttactgctatacgatcgacggtcatgaaaaaacctggtttttaaatcttcactttgtcgacattacaaaaatctttatggaaggtgtctatgaaaaccagtcctattctgcacacgcgaagtttgtaacatacatgttgaaatgccgcggaagacttgcagacatcaaacatggcaatacaaaatggcagcagaaactaaagatcaaacgcagtaaaaatgtctgatctgacggaaaatgaggtttgttatgtcaaaagatcgttcttctaattttgaattattacgtttattatgcattttcggaattctgatgatgcacactttcggcggaatcgacacttccgtatcattttttaacacagagatccatgtactggttaactccgtctttaatatgggagttacctgctttatcctgctctccggttatttcggcatccgttttgacttcaaaaaactgatccggctcgaccttatgatcatctttttcacaatatttggtacgatcgcagttggaaatctgggtataaaagcactgatcaaatcctgtattccggtaatttcaagatattactggtttatcagctgttactttttcctctgctttttaacaccatttttaaaccagatcccggaaaagctgtcaaaggaaaactttgaaaaactgctcgccgtcttactgcttcttttctccgtaatcccaaccttcggattctttgaaattatgcaggacggtggaaaaggattagtccacatggttatgatctatctgctcggacgctaccttgcgctttatcataaccgcagccataacaccggacgcctgttccttggacttttcctcagtatcggttttattttcctcgctgacagtttgctgacctttgtccgtggaaagctctatacaacgttctgccgcgactgttcgattttcattatatttggttctgtcatggttttactgctgtttcgtgaattaaattttcacagccgtttcatcaaccgtgctgccggaaatgtgctcgcggtctatgtgttagatggaacggttcagacatttctgttaaaatggatcgattttaaaccgtatgccggatcgtggtttttagtattccttgcgatcggttatgcgcttgcaattatgatcattgcgtgtctgttgaacgaggtgcggaaagcgacgattggacgactggagccttggctcgtgaatgtggtcaatgccgtggtgatgtggggtgtaaatgcggtaagaggtgttgtccgaaaattaattgattattttcttgcctgatgtttttgtttttcgcgaaagagacgaaaaaaggtgtgtctgagtgctttgtgcaatttgcctttcactaaccccgatacaccttttgttccaaacatccaatccctattttccctacaacaatttccggaataccggcaatttcttcaaaactaacgtaactgctacttcaattaagaatgcaattataatctcaatgatatatgccggcagcatcccggttaccggggttaacgtgccagcaatgacatccagccttcctccggttccaataaatccaccaagaagataacagccaaatacgcagcctccgacactgacgagaatcttttttgtccgctctgatagccgttcttcctgaaagagaagtttcgtatttaagaatataactatgaccgggacagacagccatgttccaaggtatacttcctgataatttcccactgaaagatagtctttatataccatcatctgtgtaagaaccgctgccacaaacacagcaagattccggccgatattcttcggcgtcagaaacttcgtttcactgaaatactgatccagtccatatccgatcagtggataaaaaatgacatactggaacagtccgctaaaattataataaccgcagagtccgtatccccataatacccatgctgtcggtttcaggcagtccagcaatatctgtaaaatgatcagataccagaaggtatttttcgacatattctgtgccagtgggcgcaggatcggcaaaatcgtaagcacaccgagataactgtataaaaaccagtacggcagatataccagatccgtcggcagtgacagcagaaacgaaaacggtgcaaaaggacgttctccttttaaaaccagtttcatataatacaggaacgagaatatcacaattacaagaatcatgcgcagaatccttttttgaaacagatctttcccactttcattttttccaagcaacagtgctccggataccatgaaaaacaaaggcaccgcacctttgcataccatggaaaacagaaacgatattgcatattctacgccactttgattggaaaatgacataaatgctgcagaatggttgtacataaccatcaaaattgcgagaatacggatgacctcgaggtggtatttctttttcataacttttttctcctttgtgtgtgaatacgaaacttatccgcaggccgaatctatcgcctggctcagataatagccttcccacagtttcggtgcaaccgcaagggctgcttctttgagtttttcataatctgccgtatgaattgcctgatccagatcgccaaggcggtcaatcgtaataccgcaggcatgttccctgacaaaatttgccattcccgaccggctccatacaatgaccggaatgccggacgcaaggtataatgcacatttgtgtgagttattatatcgaaggtattcgcccaggccgccttcgatctcatcctttccactgccatcccagactaatccatagtccatttcaccgactgcaaacggtatctcatcggaagagaggattccatgataatggcatccttctgccagtgtcttttcacgctccggatcgagttttccccataattccatccggacatcggaagggatctccatggcagacaaaaattctgatttgttgagattccctgcaaatgcaatttttactgcattttcttttttgtgtgcatgcgatatttctcgaatcttagcgatctgtgtctcattcatccggtaatcccagatcccgaccggtatcatgtctgaagaaataccgtttttctttaacatggaaacagtattgacattcggtgcaaggattttatctgccgcggcaagtgcccttacctcaccgggatctccatcgttctgtccgtcatagcggaatgcgttcagatcattgataaaacagatgatccggtactttttcagaagctgcaaccttttcagcagacggatttttaaatgattctccgggatcgaataaaatacgctgtcgctttttttcacgcaaaacagcaaaaacaaaaccagataaggcagatccagcagttttaaatatttactgcaatgttttggtacgctccagatgatcttcgcctttttgtccgcaagcacggaaaatacgtcacgcatggctttccccgctgcatcaaatgtttcatcctgcctctgatttaacacataaatattatttttcatgtttttcctccactatgcccggatacaataatattccgcacagaagtaaaaatatattcataaatccgtttaatacaaactgctctaacacaccgtacaacgccagagtaccaatcatcacaagctctttgtaacactccatccggtacaatcttaacatggtttttaagataattacaaagaaaagcactgctacaaggatgcctgcataaaaagtcacttgcatgtaactgttatcgatcagtccatgataacttgtatagaaaatctcctgtgtccgcggaaacagcgatagcccctgatctttataataggtattcatgatgtatactcttcccgacaccagatgattaatcttataaagcagcgcatgatttccattataaaacagtgtcgtaaacagtgaaaatgctgcaccgaccggtacagagcacaccagaaccgattttatgtttttactttttacaactttatcaaataagatcagcacccagcagaaaaagaatacaagcactcccgtcctgcaaaatgtcatcttgtaaaaaataagtgcgatcaatgatgtcactccgcaccacaggacatttaatttctcataattatagtataatactaaaagtaacgccaaaaataccgtcagaaatgcggtattaggctctcccatggcaaacccatatacatgctgttccacatagccggaatcgagttttgtcttttcaccgatatcaaaaattccgatcagggaaccacctgacagtatcaccgccgccacacagcggatccagactgcgatctgtgcaatcaccgaaaaacggcagttcttcatcgccactaccgtcatgatcgacagcagccacatattctgtcttgtgatcacagaaagcatcactccgattcccatcataactgcgatccagaatacttcccacatggtgtaggtcgtaaaaaccattttaatcccccagaacaggatcgctgtatagaaaaaccatttatagatattgtccccgtgatcataggaaaatgccttcatcagtatattgatcgcaaaatatgcataaaaagagacaacgccgatttttttaacgtcagcattttttaaaaatgttcgtaccgtgttcatatgttatccctcaaaattccgttcttttttgccggacacctgtacgcccgcataaaccgctacttctacaataacaccaaaaaatgctcccgccacagctgccttggcaatctcccgcttaaactcctgtatcgtcggagcataggcgagataccttttttgggcatctgccacatacggctcatctaacacatgcactccgtttttaccaatgctctcccgtacggtatctttgactgcctccaacagataacctgcaaattccaaagcatcttcttcattttccagtgagaatgtcccataagttctcggatatttgacatgcactgtcatcacatccgaggaagtattctgctctaagtcaaacatatcctgatatgccagatattccatatcatatccgcttagctgcttcatcttctcataagtgctgcggctttctgccaccgtgatcaccgtaccgacacgctctgcggcactctccccgctgtattcttccaccatcagagaagccatgacgcggtaatcatcctcataattcttctcagaaacaaaagaacggttcgagtaatatttgtagccccctaaaagcagtgctcccgccaatgcaccaaaaagcatcagccaccataccttaagatttccctgcaggatctcccataccgtatattccctgtctgttgcaactttcttttcttccactgcatattctccgtttttcattctattattttcctgctgactcgtgaggtttgtttttgaccacatatatttttcattttaccgcaaaacgcgcgattttaaaagcctaaataacaatacaaaaaaagatccgcactccatttctgaagcacagatctttttacgttatcactttattattcaattacaagatcaagccagtcatccaccgggacaaatcctacataagttttgccggtattaatcttgatctcattgcctgctgcatcatagtagcgtgtcggagaagtcatcttctctttcttccaggtaaccggaatcgcttttccattggtcacataatatccaccgccctggctgacacagtcgaaaatcagataaccgtgttcatcatactgggtatatccgcagctctggatcagaagattcttaaagcagagctgtttgttgtcgttacccggatctacatgtgctttaccatactctgagtagtagtaaagctggtcatccgcattgtactctaaataagaaccattgtgtgggaacggaagatccacggtattggcatcgattgcatcggatgcagaagaaagatctaccggattactctcacttgcaaactggtaatgcggtccctcataataagaagtatattcttttgaaacaccactgttttcgaagttcttgtctaaatctcccggtaagatatattcggtatattctcttgatttgccgttatccacacgtgagaatgtaccactaaaattatccacactcggatctgccatatattcatcaatatagaatggaccgccatcatgacagatgactgcattccactcggatgcaatcaggatattcgtcggacgcacacttcggatgcttcctaactgtttgatgttttcccagtctttgacaagtaccataaatctggtgattctgccgtttaatgtgctgttcatcatctcatagacaacgtctgcctgtgataaaccgtaatgtggcagtgcaatagactcattgtccaccataactgcgatcggtctctgatttttaagactctcatcaatcagctcgtttgtcagctcactgcggtacattccctccggaagtacttcctcactctcggtttcagcctctgttgactctgttccagcctctgtcatggcaacttctgtcgaatcagccgccgtctcgtctgtttttttgtcgccgcatgctaccatagatgccgccattgcaagcgcagtcagcattaaaattgctcttttcttcaaactaaatacctctcaacgtaattattttgtgctcttttgcaccgtttctgttattataccactttttaagacttttttaccatcttattttcacgttttaagaaaaccttaaggtaaaaagctgtaattcataaattacttctttttccactttgcatacagtgtcttatttcctctgcttcctttattgatgacagtaactttctttttaaatttcttatctaaataccatcccttaaatacatatccttttcttgtcggatttttcagtttgatcgtcgaagtcttgtatgtatatgcagtcggattctttttggcattttttccaccatttaatttataggtaatcttatatttcgtaagtttccactgtgcatacagtgtaatgttcttcgtgagcttgatctttgctttgtttttataagacttaccttttccgtttgccttggtattccagcctgtaaacgtataatatttcctggaaaacttattttttgagatcgcggtggaaacaccctttgccatactctgcttgctcatgcttcccttgccgccattgctcttgaatgtgatcttataagttgtcagctttgcgagtttcttcgatgaaacactgctgtccgcatatttattgcagactgcaactgccttcaccgtcttaccaggggaaactgtaaatgctcccgtataacgtgtgccctttgaatatgccgcatttggcccacttccgtctgtggtataataaataactgccccagatgttttcgatgttatttttactttataggaggtaccgcttaccgacgctgaaatgaccggctttgcagctgtctgagtgattgtggcaatcgttcccggtgctgtggatgtcgccccggaatcgatcgtacatgccggcaggtaaccctcccagatatcttcttccgcatggaaaacataggaactataatttactgtatcataataattatcgcttctttcaaaataaccatagtaaatggttccgtccgcatcatcccatgtacagtctacattgtaccaggaatcgttaagacgcactttattccactcgtgatagtaacttgttactgctacggcatcgattcctgagccattgcacatcatctcaaatgcctgtgaatatcccgcacataccgtcagatctgtgcaaaatacactgtaggcagactgggaatatgccgtatcctcatctttaaaattattatcatataaggtctggttatattccactttatcaatgatcagatcatggatcatttttacctttttctcatctgttgagcaggcatcgatcttcttctgccaggatgaaacctgactctgcactttttttgttgtagctgcacgtgcggaaccatttgcaaatgcaggataaacacagcctgcaataccataagttccattttttaagtatgcactctttaagaaatagtactgtggatttgaataacggaagatctgatatacctcctccatctgcgataatgacagcgaactgctgcctactatatcaatataatagtaagttgtcccactgatattgtattttgctgcatctgcctgtgttgtcatatactttaaacaaactttattcaaagcatcccagtatgccttttccttactgcttaactgattataaaaataataacttccatatttttcccaggtactgttataataagcagatgattttaaaatattttctgcttcttcctcttccgcagtttcgccatccagtgtgatttcaccaactgcttcaaacggcagaagacccgtcggcattcctgtaagtgcagccgccctggtttccgcctcctcagtttcttcgacctcttcggtttccagtatttctgtctcctccaccgtctgcgtttccagtgtttctgtttccccggccgtcttagtctccacttcctcagtctctgccgtttctgacacttcaatttccgttgcttcactctgtgtcactccggctttctgctccgtctgactcgcattttctgtatctttgtcctctgcgtcagcctgctccgtcccagtttcggtttcagtttcctcactctgcacttctttctgaagttctgtttccgtttccggcgtaatctcctccgtctgctcttctgtaatctgtgccgcataaacagaaccggtctccgccggtgcaagcacagtccccacagtgacaaagactgccataaacactgccaatacctttttcttcatacctaacctcctgcttatctttgacactatttcactttttccatatcctcacggtttgtgtccgaaacgatatagtgtggtctttttttgacttccagatatgtttttgcaatatactgtcccataattcccatacagaataactgtatgccgccgatcagcgtaataatacatacggttgatgcccagccatcgaccggatcaccaaagatcagtttacggataatgataaacacaactgcgataaacgaaacaaatgtcataaacattccaaaccaggatgccacggaaagcggtgcctgtgaaaagttaatcacaccatcaatcgcatagcgaaacagtttccagaaactccattttgtttcccctgccacacggttaacgttctcatatggaagccagtatgtcttaaaaccgatccacccaaaaattccttttgaaaaacggttgtactctcccatctcgacgatcgcatcaaccatgctgcgtttcatcagtcggaaatctctcgcaccatccacaatatccgcatctgaaatcttattgatcagacggtaaaacattcttgcaaaccagcttcttatcaccggttctccttttcttgtagcacggcgcgttgccacgctgtcatacccctgattctctaatatatcaagcatttgtggtaataatgacggaggatcctgcatatccgcatccatgactgccgcataatccccggtcacattgcaaaaaccggcatacatagccgcttcctttccaaaatttctggaaaatccgatataagtcacatgatcatcttcttttgcgaactctttcaaaagccccagtgttccatcctttgacccgtcattgacaaaaatcatttcataatcacagtccatggactccataacttttttggtttcccgataaaagatcggtaatgcttcctgctcgttatagcatggaacaatcaatgaaatcttcatttgtttctctattctcctttttcttcatcctcattttgtttcgtccaggtacgctcgctgatgatatagcgcggccttgccttgacttccatgtaaatttttccaatatattcgcccagcacgccaagacagacaagctgtacacctcccataaaacagatcacacagacggtacttgcccatccggtcaccgttctgccgcagatctgtgtaataacggcccataaaactccaacaaaacttaacacagacacgccaattccaagacctgaaataagacggagcggttttacacttaagctcgtgatcccgtcaatcgccagattgaccatctttgcgagcggataatgcgattcccctgcgatcctctcatgcctctcataaaaaacactcgtactcttgaatccaaccagcgggatcatcccgcgcagaaataaatttacctctttaaaacctgcaaattcctttaataccctcgccgatatcagccggtaatctgcatgattataaacggtttccacccccatccgcattaagaccttataaaaagcctgtgccgtaaatcgcttaaagaaggtatccgtatcacggctgcttctgacaccatagaccacttccgccccgtcatagtaagcatccaccatcgcttccatcgttgcgatatcatcctgcccgtcacaatcgatcgatatcgtaatgtcactgacatcttttgcctccatcagtcctgcaaggactgcattctgatgtcctctgttgcggctttgacagattccaataaagtgtggattctccctggcaagtccttctataatctcccatgtgcggtccttactcccgtcattgacaaaaaggatgcggctctcttcacttatcttttctttttcgatcagcaactgtaattcctctaaaaacagaccggaagttaccggtaaaacttcttcctcattataacacggaattaccatatataagactgccttcatttactttctccctttaattctgttcaattatgccctcaggctctatcaaccccctgcccgatacaactttttatttccggaaaacccataatttactgatcacataattcaatacgatcacaatgacctgggctgcaatttttaccaccatgcttccaaatcccagttttgtgataaacacgaaaagaatcacttcctcaacaactaacgttgcaactcttccaccgaaaaagtttatcatctgtacaagaaattctttctcaccattcgtcttcccgtcaaatacccagatacggtttgtaaaaaaagcaaataaaaccgctaaaatccatgaaaaaatgtttgcgacaagctcgttcattcccagtgaaacattaaaaaaggcatatgtgataacacttatcacaaatgtcaatccaccgaaaaacagatataaaagcatttccttatgttttttataaaacggttcaaagatatttaaaaccggcagatgcatcagccggtcaaaaatatccggtttccttgtatccataaatttctccgttcccttctctttaacgtatcataacgtttctattatagagcacacgggattgcctgtcaatgaagcgggatttttttgtaagtttccaatttccagaatttaccaacatattttttctccccctgtaaataataggattaggacatacagtaattcttacttgtaaatcctaataacaaacaacagattaatttacggaggtgaaatccatgagtggatctaacaattctggttctaacaccagcaaaatggctgtaccacaggcaaaagaggctatgaaccgttttaaacaggaagtagcaagcgagatcggtgtaccgttaaaagagggttacaatggtgaccttacttctgcacaggcaggaagcatcggcggcgagatggtcaaaaaaatgatcatgaaacaggaagagcagatgtcaggcaagtaaaaaaacaacttgccggaagtaaaaaacaacttcccgcaaataaaaaacgatttgccgcaagtaaagacaacttgccgcaagaccaaaaacggctccacatccatggtgtgatgtgaagccgtttttcttatacaacatacactttactatttttcattcgcacggtacacaagtccctgacggacatgctctactgtctcatcatcggtaaagtaacgcacgatctcaaacgcaaacggaatcgctgttcccataccgcggcttgtgatgatattgccgtccactacaacctcatcctcgctggtcgtcgcaccggttaatttttcctcgaagcccggatgacaggttgcatgtttcccttctaacaggcctgctgcgcctaacacactcggagctgcacagatcgcagcaaccaattttccttcctctgcaaacttgcggatcacggcattgacggtctcattttccagtaaatgcatggttcccggcataccgcccggaagcacgattccatccaggtcttcatatccggtttcttctgcaagcgcatctgctaaaaaagtaaccccgtgagagcttgtcacttctttttttccggtaattgagagcataacgatctccatttttgcacgacgcacaacatcaactacggtaagtccctcaatttcctcacagccatctgccatgaaaattccaattttactcataaatatttcctgcctttctaaagcttttgttttccatttttgtacagataaagtatagcaaactgattttttgtggtcaatgacttacatgtcttccaaaacttcttttttcctgcccctgcaactgctataatagatgcagtagtgctgttttcacgcaccaattaaaaattttttaaaccaaaaggagtttctacaccatggaaatcgaacgtaaatatctggtaaaaaccttacctgaccacttagaacagtatgcctgtaaagtgatcgaacagggctacttaaacactaacccggtcgtgcgcatccgccgctccaatgacgattacattctgacctacaagggaaaaggcatgatggtgcgtgaggaatacaatctccccttaaatgaagaagcatttcttcacctgaaagaaaaaatcgacggaaggctgattcagaaacgccgctatctgatcccgcttgcccccaaatatacgatcgaattagatgtgtttgagggagatctcgcaccactgctgctcgccgaagtagaatttgaaacagaggaagaggccaatatcttcactccgccggaatggttcggagaggatgtcacattttccggcaaataccacaacagccagttaagtaaacttccgtaacctaaaatgggtgtggcaaaacagccacacccattttgatttttaaattttcccactgtctttcagcagtccatacagtgtcggtgtaaaatgaaactcctccatcatatgttccacctctgtgaggtaattttgttttaccgcacgcggcacgatcttcttctgtactgcacggatcaggatattctttggcgtatgcgcaaaatcaacaaactctaaaagctgtgttttgtatccacacacctccagcagattcgcacgtatcgcatctgtcgcaagcgcggaaaaacgctcttttataatgccatagcgcgtcagtaatgaaaactgctccgtctttatctgtccgtttaactcatgctgacagcacggtacggaaaaaatcatctttgcatcccactgaaccgcattataaagcgcataatccgtcgccgtatcacaggcatgcagtgtcactaccatgtctaccggaaacggtgtctgatagccgttgatgtcccccagttcaaaatgcagattgtgatagccatatttctccgccgcaagattgcagtttttgatcacgtcctctttcagatcaagtcctacgatctgcacgttcatttttttgatctccgcaaaataataatacaggataaaagtcaggtaagactttccgcagccgaaatcaatgatatttaagtgatcatacggataatcccgcactccgtcctcgatgatttcaaggaaacggttgatctgccggaacttatcgtacatagtgcggactacttttccgtctgccgtaaaaactcccatatcaaccagcggtgggatcacggttccctcttccaacagatatttctttttacggttatgggattcctgcacttttgctgcaccctctgcctgctttttgcagcggtaagtcacctttccctttttcgagatcaaaagcatatattcactggttccatcccaggcatttaactgtaaaaattcactgccgacacgccctgacagataatctaaaagtccatccggttctatcttttcatgaaaaacctgtttctgcgtataagcggctgcctggtaaccggacgattttttttcaatctcgatcttgcggtattttgcagctttgtcagagggtttgctgacgatcaccttgtaaatctcctgctgcgtgatctgttgtaattttgattttaattcttctgaaaccatgtaatctccatttttgtacactaatcttcaacaaatagccgtgtgaaaaacaaactcacagtcttattttccacacagattatctgagacgtgtgctctcaaaacgctgtctggtacggatacactgtttgagctgctcataacggtcatcgagatctccttccgggatcacaacgtctaaaacaactgccatattgttgatcattttatctgtaatgatatcgcgcatagatgtcaggatattatacttttcctcaaaggaaaccgcatccaaaaactccataagtttcggttctacctgctcttctgtatcagatgaagcacctttactttcctgcgctccgacatctcctgacacagctttgttgctctgtacactgatatctcctgacacgcgctcattctcccgtacgctggtatctgcatttcttccgttctgattctgtagaatcgtccgccctgtactatgtccaacactatatctttgtgtcatgtctgcagaccgctcactgccagtctgtgctgcctgcacatcctctttcttctcccgctccaccagctcaaaccggtatttctgcgtcacctccggatatttttcgtgatccacttcactggtaaacatggtgagtggtcttgcatacacgccaaaatctccatataacgcctggtagatcaccagtttttctcctgtttcagaatgtgttgcaattgctacgatctgatataatttatttttaaaatggcggtagatctcgccacttaccggtattctttctgccatactgttgctgtcctttctttcaacttatgccgtatgtacttctgtcaatcccgcaatttcgtccggcagttcaaaacggtttaacatctccactccctctgccacaaaatcgcgctcaaaactcaggtttgcctgatatcccatgatcatcagatcattgacctgatccatcagggaacattcgtcctcacactccccatgtacctttttcggcggctcccctgttttttcataaaactgttcccgcagttcgtccgtctggttttcattgacgttcgaatctgcgcggtttaaaatagtatcttttccgggatttgaaacaggacgcgctgcctgcgtgggctttgccgtattcgatgcagccgtgccatacttctgctgcagcctctgttttaattcctgctgtcttgcagataaatccctctgcatcgcatttaccgcatccgccagaacatccggtcttcctgcatgaccaccataagaaacctgtgtctgtggtacattttttcttcctccgccgggctgattcggcacagccgctttcttttgttttccttcttttttctttttatcactgtaaatccctgctgcaatgccaataattatcacaatcagaccaaacaaatcatccataactcttcatgctcctctcctctttaactttgtaaaaatgttatatatacaaagttcactattcgtattataatattttaatatacgtttctcaacaaaattttactctttggaggatatatgttaccaaaaaaattaaagcggctctctgacatgcagttgatcgcacttggttttcttctgcttatcttaggcggaacatgtcttttgatgcttccctgctcttcccgcaccggcgaatttaccccttttatcacagcactttttacagcaacaagtgccacctgcgtcaccggtcttattctggtcgatacctatacacactggtccttctttggacagcttgtattattacttttaatccagatcggcggtcttggctttattaccatcggaactgctgtttccctggtgctgcgcaggaaaatcggtctcaaagaacgcggctggatcaaggaaagtttcaatgtattagatatcggcggcgtagtacggctgatcaaacgtgtattaaagggaaccgtactatttgaaggaatcggtgcactgctgttatttacccgcttttatcctgaaatgggtttttttaacggactttattacagcatctttcattccatatctgcgttttgcaatgcgggtttcgacatcatgggaaaatacaaaccatattcctcttttactgcctattatgacgatccaatcgtaagctttacgctgtctgcattaattctgatcggcggcatcggatttatcgtctggagtgatatcattgaccacaaatggcactttaaaaaatatgccctgcagacaaaaatggtcttgagtttttcggcagttctggtatttggcggagctttactgttttatttgctggaacgaaataatctttacgccgatatgagcacgacaggcatcatctgcagttcttttttcagtgtgattacaccaagaactgccggttttaatacacttgatattggctctctcacagagggtggcaaactgcttaccattatcctgatgttcatcggaggcggttccggttccacggcgggcggcgtcaaaatggcaaccattttcgttctgctcctgcatctgcgctccacgctcttaagaacgaccggaacaaatatttttggccgcaggatcgaagacgacacgatcacaaaagctacagccctgctgtgtacctacctgtttgccggacttgccgcaaccctcgcaatctgcggcatgcagggttttccgctcggagatacgctttttgaagtcatatccgcaatctgtactgccggaatgacaaccggactgaccggacagcttaattttatctcgcggcttatcattatttttctgatgtatatcggtcgtttgggaagcctttcctttgcactttcctttaccgatcacaaaaaactgacacatatcatgcagccggtagaacgcatcaacatcggctgagaaaggaatttacttatgaaatcaattttaattatcggactcggacgtttcggcacccatttatgtcaggatcttgccaaacttgacaatgagattatgatcgttgacaaagacgaagcaagcttagaagaccttcttccccttgtggtcagcgccaagattggcgactgcaccaacgaaaaagtattaaaaagtcttggtgtcggaaactttgattactgttttgtctgtattggtgaaaattttcagagcagtcttgagatcacaagcctgttaaaagatcttggagcaaaatatgttgtcagcaaggccaaccgtgatatccacgcaaagttcctgctgcgcaacggcgcggacgaagttatttatccagaccgtgatattgcagaaaaagttgcagtccgtttttctgcaaatcaggtctttgactatgtggaactcggaaataatttttccatttacgaaattgcccctctgccggaatggatcggtcattcaatcagggacgtcaatgtccgcgtcaaatataatgcaaatatcatcggcatcaaagctgaaaacggcatggaactgatgcctaatgcagagtatgtgttccgtagagaagaacatctgatgatcatcgggcataagcgggacatggaaaagattttgaagaaattataagtgcatttctttttcataaatgtctgctgcctcttctaacagttttcggatttcaagatgctgcgggcactgtgcctcgcattttccgcatttgatgcagtctccggctttaccgcttccgtcgatctgacagcggtaagaccccctcaccgcatccgtcactccaaactgtacgcccatgttgtagactccaaaaatatccgggatacggatctttttcggacatccctccacacagtaacggcagttggtacaaggaatcgttggaagtttttcgagttcttccaccacctttccgattgcctgctgctctttatccgtgagcggctgaaaatctttcatataagccgtattgtcctgtaactgctttagatccgacattccgcttaacaccaaaattacatttggcagtgatgccgcataccggaccgcataagatgcataggaagcattttcatccagcgcacttaagatcctcgccggctctccgaccatatttgctaacgtaccgcccttgacaggctccatcacgatcacaggtactccatgcttttctgccacctcataacatttgcgtgactgcacgttctcagactcccagtcataataattgatctgaagctgcacaaactccatctccggatgatttgtcagaatctcatccaacacatctgccttatcgtggaaagaaaatccgatatgccggatctttccctccgctttcatgctctgtacaaactgaaatccgcctaagttctctgcctctttgacccggtctttattcatggcatgtaaaagataaaagtcaaaatactctacctggcatttttttaactgttcctcgaaatactttccgtagtcagcgtactctttgaccagccataccggcatcttgctcgcaaggaaaaaacgatccctcgcataccgttgtaccagacagcgtccgactgcttcctcggatctgccattgtgatatggatatgcggtgtcaaagtacttaaatccctgttcgatgtaggaatcgaccatctcgcagaacgctgcgtcgttgatattttctgtgctgccgtcggttaccgggagacgcatgcagccgaatcccagtttctttggcatttctttagttaactcgctcatttgtgtgtgcccctttcttttgggttgttataataaagtaatagagcctagggcgaaactcttttttaggttgtggtggtcgttgtgtggcgggcacctgtttaacgaaggcacgccgcacaacgacgctacgttcttgagagtttcgcgttggcaaacctttctttttattatagcaacccaaaggaaagctgtatagtattctttttcatgcaggtacgcaggcggtcggcacaccgcaccagccggcaaacccagccaccccactcccacaaaaaagcagagccacccatgccctgctttttcatccccgcaccttaactctggtacacctcaataaagttcttcacaacctccaccagcttttcatatcccatggaagtcgtatccagacagaaatcatagtttctcgcatcataccagtccttcccggtataatatttataataatccgcacggtgcttatcgatcttttcgatcttattctccgcatcccgcccggtgattccgtcatgctccattacacggacgatacaatcttccttcggtgcaaagaaaaacaaacggagcacattcggatcatcctttaacacataatccgcacatcttccgataatgatacaggactcttcctccgccagttcacggatcacttttgcctgataattaaacaggttgtcatccgatacgaaatctgcgctctccggcgggattacaccgcccttgtacggatttttgcgtgcaatacgaaacaaaggtgatttctttaatttttcatcggtctgtccgaaaagcgcctcattgatgccgctgtcatcggatgccattcttaaaatctctctgtcgtagcaattaattccaagttcttctgcgagcagcttacccagcgtacgtccgccgctgccatagcttcttgcgattgtaatcactgtttttttcattgctgcatccccctattctccaagatatgctttcttgatcgattcgttattcatcatttcctttgcatcaccggagagaacgatattgccggtctccagtacatatgcacggtcagcgatggataacgctttcttcgcattctgctctactaaaagtacggttgttccacccgcagagatttcacggataatgtggaaaatctcttccacgagaatcggagaaagtcccatagacggctcatccatcaggatgatcttcggttttgacatcagcgcacgccccatggcaagcatctgctgctcaccaccgcttaaggttcctgcaagctggtttttacgctcttccagtcgtgggaaactctcatatacttttgctaatgactctgcgatctcctgtttatcttttctggtatatgcacccagttttaagttttcatatacggacaactctgcaaatacacgacgtccctccggcacatgcgccattcccatggaaacgatcttgtgtcccgggatctttgagatatcacatccctcaaaaataatctcgcccgccgcaggactcaacataccggtgatcgtctgcagcgttgtcgtctttccggcgccgtttgcaccgatcagcgcaatgacttctccctcattgacctcaaaggagattcccttgattgcctggatcacgccatagtatacttccagattctttacttcaagcattgccataacttaaaacctcctttcctattctcctaagtatgccttgataacctgtggatcattcaggacttctgtcgttttaccctctgctaaaacctgcccgaagtttaacacggtaagtttctcacagataccggataccagtttcatatcatgctcgatcagaagcactgtcatgtcaaactcatctctcacaaaatgaattgtctccatcagctcttttgtctcgttcgggttcataccggcagccggctcatctaagagcagaagctttggatttgtcgcaagtgctctcgcgatctcaagttttctctgtttaccataaggaaggttggatgcaagaaaatctgcttccttctcaaggtcaaagacttttaaaagttccattgccttctcattcatctctttttctgccttatggtacttcggcagacgcaaaattccggtcagtgtggaataagtgatctgattgtgcagaccgatttttacattatcaagtacggactggtctttaaacagacggatattctggaatgtacgggcaatccctgctttgttgatatcgatcgtctttttccctgtgatatccactccatctaacgtgattgatccgtcattcggtgtatatacaccggtgagcatattaaatacggtcgtttttccggcaccgtttggcccgatcagtccgtataactgtcctttttcaatcgaaatatgaaatccgtctactgcacgcagaccgccaaaggagataccaagattttttacttccaataaactcatgttactgtactcctttctttgtgttctttttcagttttgcagctacacgctgtctgaactcaatacatttcggtgcccagttaaagagcatcattgcgatcagtacgatggaataaatcagcatacgataatcggagagtccacgcagtacctccggcagcaatgtcaggatcacagccgcaatgatcgaaccgcggaagcttcccataccgcctaatacaacaaatacaaggatcatgatcgacatgttgtaaccaaagtttgcaggtgtcgctgtaacagtagacagattgtgcgcatataaaacaccgcctgctcccgcgatcgctgcagagatcgtaaatgccatcaatttaaattttgtaatgttaataccaaccgattcagctgcaatacggttatcacggatcgccatgatggcacgtccgcttctggaatttaccagatgatatacaatgaaaagacagatcagaatcataatcacgccggcggtaaagctggataagtgcggaatctttgcaattccttttgcaccattgatcagccactctccctcatcggaaagtttgattgcatttccgtttgaaatcgcaaaatgaaaaccatcggtatcttttgcgatataaagtacgttgatcacgtttttgatgatctcaccaaatgcaagcgttacgattgcaagatagtcacctcttaagcgcagtaccgggataccgatcaggaatccgaaaaacgctgctgccgctgttccgatgatcaaaacagtgatgaataaaatgatctggtttgggatcacattctgtaaaagttttgttgcaaatgcacttgaaaaagcaccgacacacataaatcctgcatgtccgatactgagttcccctaaataacccacgcacagatttaatccgatcgcaacaatggaataagtgcacatcggcactaaaagtccctgcatcagggaggacaacactccggctgcaatcagtatctggacgatgagataggccacaattaccatcgcaaaggtaatcagatggtctaatgtactttttttcattgattttacatttaattttgacatatcattactccaatctgaccttatactttttcgtggatctgttttccaagaataccggtcggttttacaagcagtacaatgatcagcactgcaaacacgattgcatctgacaactgggacgaaatataagcacgtcctaagatctcaatgataccaagcaggataccaccaatcagtgctcccggaatagaaccgattcctccgaataccgctgcggtaaatgctttgataccaggcatggaacctgtataaggagtcagtgtaggatatgcggagcagaacagcacacctgcgattgccgcaagcccggagccaattgcaaaggtcagtgaaattgttgcattgacattcacacccatcagctgtgccgcatctttatcctcagaaacagcaagcatcgcctgtccggcttttgtttttttgataaaaatcatcagaccagccatgatgatgacacaggcaagaaccgtcacgatcgtggttcctgagattgtaagacttccacctgcaagttttaaggacggcagtgttacaacatttgtaaaggactttgtgtctgcaccgaataataacagtgcggcattctgtaaaaagtagctgacaccgatcgctgtaatcaatacggcaagcggggtagcacgtctgagtggtttgtaagcaattttttcgatgacgataccaagaaccgtacaaacaataacagacagaacaactgccacaagtggcggccatccctgaccgttcatggcaaggaataccacataacagccgatcatgataacatctccatgtgcaaagtttaacatctttgcgataccgtataccatggtatatcccagtgcaatgatcgcatagacgcttccaagactgataccattgatcaggtaagataagaaattcataacaatcctccattcttactttataacgttaatacattgatttttttattataccatttgaaatacttgtatacaatctttttgtttcaaaaaacgccacaatgtgacgtttaaaaatattctgtcataagtataaaaggggctgactgcgacagcttcgtctgcaaacaacccctttctttccttataaaataactatttattttttatttcatttacattgctgcgtaagcaccatctttgatcactactgccttaggagccttgctgacctctccggttgcctgccatgtcattccctcacctgtcaatccatctacagagatcgatgtcattgctccggttaatgcagtgcccagatcagaagcactcatatccggtgttgcacctgcctgctcgatagctgctttgataacatagattgcatcgtaagcatctgctgcgaactggtttggaacatcgccatatttctctttgaatgtggaaacaaatgcttttgttttctcatcatctgcatctgcagcgaatggagttaataacataacaccttccgctaaagatgtatcaaagttctcaacgccaaggattccgtccataccatcaacaccgaagaaagccggctcataacccataccgtttgcctgggttaaaatgatagatgcctctgtatagtaaatcggtaagaatactaagtcagcgcctgcagactgcgctttctgaagctgtgtggaaaaatctgtcttggaatctgctgtaaacgcttcctcagctacaacctcaagtcctttattctgtgcctcttccacgaaagtagcttcgataccggaagaatatacgctcgaactgtcatagatgactgcaacttttgttcctaaattgttgtctgcaatgtactgtgcagaagctgtaccctggttcgggtctgtaaagcatgcctggaatacattatcgtttgtgataacatctgtggatgatgcggatggtgtaatctcaaacataccatcctctgctgtcttgtctgcaactgctacacaaggtgtggttgtaacagttcccattaagatctgcataccccagtcttttaatgagttatatgcattgacggatttctctgcatcgttctgatcatcctctgctttgaatgcaagctgatatccgtttgcaccgccagctgcattgatctcatccactgccatctgtgctgcgttcataactgcgtttccgtaaattgctgcatcaccggttgtcggtccgatgcttccgatcttaaatacagaaccgtctgctgcactgtcgtctgatgcgctgctgtctgctcctgcagatgcattgcctgttgatgtgtttcctgctgaactgccacagcctgccagacaacttactgccagtgctgctgttaaaaacatacttaccgcctttttcataatagcctccattcctgcccatttttcagggcatcacaagtttgtgttcgagcacaaatcttgtgtgtgaaaaatgtaatttttcacactttttcctccattcatcttccgcaccttatattgtcatgatatttcatacatttgcgaaagctctgaaacttgttgttgcaataatagcaaaaatatacactttgcacaatattcagattcacctaaattcttgatggattttaatcataattatacaaagtgacatgtttcataacttttagttatatatagcatgaatcatacgaataaaagcatccatatcctcttttaaccctgctgcttcgatgctgtctgcatagcggtccgtaaaattttctttcagataatccgaaaggaactgattgcgctgtccattttccatatcagcaagtgtatctttctcttcacgaatcaaataaaatgcaagtgcaaaaaaatccggtgcttcccatgccgcagcatcctttaacactgcctgtatgttttccagctcgctgcgcagcataagtgtgctgatctttgcatccggcattccaagctccgatgatgccgtctttaaacactttaccgttgaaccgtaatccggatcgtcctcccggatcgaacatatgtgataaacatgatctaaatccacgatcaaagaatccaggcttttttttacatcccgttccggttcctccgtcatttcatccagtaaaagttctatcttacgctgtgcacgttctaaatgttcccttgatgttttatagccttcctgaagactttctcctgacctctgtgcctcagttattatttttgccagttcaccggcagctcccttttccatcccggcaccagtcagtttccccttccattccttttccctgctgcgctgttccttttgtttctttttctgctcactatccccaaatatcaattttctctcccccttcaaactcccgcctggttttaacacagtaatctttgtctgcgccggtggtctcctgccagtcagtgtaacaggaaatatcctgccacaagaataattccaagcactaaaatggcaaccggtataaacgtgataaatgctgcgatgatcattgcaggaatatcccccttttccagttccggacgttccatctcctcatacggctcccccgcttcttttctgcgttcttcctcggcagcatcactgccctcatgcagttttttcattgctccatctatttttctctgaaataacataaaactctccatttcttacttataaaataagagctcactctcactaaaaacactacgtttccagtttaagccagctcttatcatctgtcaatttgtatctatttttattttttgctgctgttcacatctatagtgcagacaataactatttttcttccggcacacctaatttatgatgacatgcaacaaaatgccccggttctacctcttcaaactgcggtgtaacattcttacagatctccgtacagtaacggcatcttgtatggaacttacatccttttggcggattgatcgggcttgggatatctccctcaagaatgatcgtctctttcctgccgtccacatccgttgtagggatcgcagaaagtaatgcctctgtatatggatggtacggatgtgcaaacagatgctccgtatccgaaagttccatcatatttcccagatacattacaccgattctgtcactgatgtatttgataacagaaaggtcatgggaaatgaacagataggttaaattattctgctcttttaagtctaacagaaggttaatgatctgtgactgaatggaaacatccagtgcagataccgcctcatcacagacaacaaacttcggatgtactgcaagagaacgcgcaataccgattcgctgtctctgtccaccggagaactgatgcggataacgatgaataaaataggacgcaagtccacacttctccatgatctccatgatataatcctgcatcttcggatcaccttttttgaagatattgtgcgccatcagtccctcgccgatgatctgtcctacggtcatacgcgggtttaaggatgaatatggatcctggaaaataagctgaagatcacggcgtaaataacgcatctctgcatcggttaagtttgcaagattgatgccgtcgtccttctgtacctcatatttttcaaaatcttcatcctttttgcagttgtcacggatcttatcgatctctgctaactcagcctgtacttttttctgaagctctggaatctttttctttacttccccggctttcgcagattttccgttcttctcaaactcgtctgcctgtgcattgatctttcggatctctttcatggcaagatactctgcgagataatgacggcctgcctctgcaagtgcagtctcatctaacgtataaagtccaccaatcagagctgtgatatccaaaagatcgttatctgcctcgctctccatctcggcaaggtgctgtccggctaccttcttagcaatcttttcttcctcagtgccctccggcatttttgcatagtcagcctctaatttttttactttatctaaaagttcctcgcattttttctttttatccggaagattcttaaagatctcctcaacatattttaaatcaaaatcttcaacggtacgtccgtaatatacggtgcgtccgccggtctgacggtaaagctgtaacagcgtacgtccgaatgtggattttccacatccactctcacctaccagaccaaatgtctcgccttcgtaaatatttaaactgattccatcatttgcctttacaaatgactgtggttttcccatcttcttttttccgattgggaaatactgttttaaattcgaaacgcgcagtaataccttgttctcgtcactcattagtttctttcccctttcttcggataaaagcagcgtaccatatgtcccggttctacctcattcagttccggttccatctcacggcacttgtccgttgcatatttgcagcgcggtgcaaatttacatcccttcggaagatcaagcggatgcggtacggcacccggaattgcctctaaacggattccggtcggtgtatcgagacgcgggatagagtaaagcagtccttccgtatacggatgcaggtaggagttatccccaaaaatgctgcgcaccggagctttttccacaacctgaccacagtacataacagcgacatcgtctgccatctcgttgataacaccaagatcatgtgtgataaagagaatggatgttcctttctcttttttcagatcattcattaattttaagatctgcgcctggatcgttacatcaagtgcagtcgtcggctcatcggcgatcaacagtttcggtcggcaggcaagtgccatggcgatcatgacacgctgacgcataccaccggaaagctgatgcggatactgttttgcaactgcctccgggttcgggatacggacatcctttaacatctcaaccactttcacagctgcctcttttttattcattccctgatgaatgataaacggctcggaaagctgacgctctacagtaaaaatcgggtttaagctggtcatcggctcctggaaaataacagagatctcatttccacggatcttacacatatcttttaccgatacatctgcaagatttttaccatcaaaaatgatctcgccgctgtcgatatagccgttgccgtctaataattttaaaatactcatggcggaaacactcttgccgcttccgctctcacctacaacaccaagtgtttttcccggttctaccgaataagaaacaccgtttactgccttgacaataccctttttcgttttaaagaaggtatgcaggtcatgaatctctaataaagccattttgtgtctcctcctttaacgctcatttgatttcgggtcgatggcatcacgcagaccgtcgccgaccatattgatacagattacacagatacctaacatgatagccgggaatacccatctccaccagtagttctggataacaacggaacttacgcagccgttcaacatatttccccaggtaggacgcggcagtttcacaccgaatcctaagaaggataacgtagactctgtcagcatacaatatgcaaaatcaagcgttgcggatacaatgataaccgaaataacattcgggataatatgcttaaatacgatcacggaacgttttacacccatcgcatttgcagcggttacaaactcctgctcacgctcggcaagcacctgtgcacggacaagtcttgcaaggctcggccagcttaatataccgagtatcaccatgatcagggcaatccttgcgctctctgtcatactgtttccgataatagatgttaagatcatcgccatcggcaggaacggaagacatgcaacgatctctgtgatacgctgtaacacgatatctacccagcctccgaagaaaccggacacaccaccgacgatgataccgatgatcgtggaaatgataacagagatcgcaccgatcgtcatggtcatacgtccaccgtttaagatacgcgtgaatacgtcacgtccaagttcatcgcttccgaacagataaccttttaatccccaggtcacaatatcaccggattttgtcactgcatagttctgataagtaccgccgtagatggcagtaacatcttttgctttctttggaacgtctgtctggtgttttgcattgcttccccaggagtaaacagttcctttatcggtcagtgctgtgatatggtatcttccggcaaacatggaaacgatctctccatccatctccgggatttctttttcactcttgttagcttttccccaaatacggagagaaccatcctccatcagtgcaacacaggcatcggatgttgtcacaatatcttttgcttttccaagatcttccgggatattggaaatatcggatttctgacttcctaaatgccggatctcaccatcatctgtgagtgccattaaagttgtattggcaacagagatctttgcaatgtggctgttaccgtttcttcttgtcaggcgcacatcatttaagttttcatttccccatgcgattacttcgccgccttccgttaacacataggaaatctgataaccggctgcgatctgtttgatcttttcatgttttacttccatcggaatctgacactgtcccatacggtcactaccccagatgaaaagctctccatcttcattgagtgccatgacatggtcaaatcctgcagatacagataccacttttcccatttctttctgctttggcatcttctttgcaatgtcgatcttgttactgatcttggtgtaaccccagacatagacttttccgtcattgtcaacgcccacgctgaatgttgcacccgtggaaatctcttttacatttccttttaaaccatccggcactttcatcatattcagtcccggagcgacattgatctgtgtctcttctttttcacttaagtcgatcgggttaaagaccggtccgatcagtacgatcaggaaaataaccaaaaatacgatcaggccgccaaacgcaagtctgtttgaggtaaaattcctcacaaccgtacggagcggactctgaagcgcttcttcctgtaatacatcgagttctttatccctttttccaaaaaggtgtttgagcatcttcatgtttttcgttcctcctacttatcaatgcgtacacgcggatctaccagaccgtagcttaagtctgtgatcaggttgctgagcagtgtgatgatacagtagagcatgttgactgccaatgccatatcataatcctgattcatcagtccgacataatacattttaccgataccattcaactggaaaatctgctcgataacgatcgaacccatgaaaatactcatgaaccagctgatgatcaatgtgatgaccggaagaagtgcatttctccatgcgtgggaataaataacaaccttttccttcaaaccttttgctcttgcagtacggatataatccatacgaagtgcgtcgatcattgccgcacggacataacgtgtcatacttcctaacgctgcaaccgtcataacgatgaccggaagtgccagatagtggagacggtcaagcacgaatgccactcctgttccctggaagttcggcgtattcatgccactgatcgggaaccagccgagttttacggcaaaaacaaaaataaataccagtgcaactatatattgaggcatgctgtagccgacaatcgtcagtacctgtaccgtattgtcaaatttagaaaattttctgaccgcacagtgaataccgagcggtatcgtgatcgccaatgcgagtatcgtggatacgatattgatctgtatcgtgtttaacagtggtgtagagagacagtctttcacatcttttttgtagaaggaagaatatccaagatcaccttttaacaagtttcccatccattttacatagcggaccggaatcggatcgtctaatcctaatttttctctcgcttcctgatagcggagctggaatgtctcatcagagactttacctcttaagttctgcacctgattaagagcacggtcaccaggtacgttattaaacagtacaaaaaggataatggatactacaaagaatacccctatcatatataaaattcttttcccaacgtactttaacataatttaaccaaccttcatttgatttttcttcttcgtttccttaggaacaaaatcctgacatgcccctttgatcccattccaaaagaaacgatcaaagaatttgccggaatatataccgcatgggcgcgggacgaatgccccacgccacataccggtaaaatttcacatggaataaaatattacattgaaatgaaatattctaatcagaatcaattactccatgtttgcatacagaattgcgtttgttgcatcccagttgtatccatcttcttcaaaatcatgtaattttgatgtgaagaagtcatgataatcattggagtacagcggaatctcaggaagctcatcattccagtcagcgatgaaatcgaaccatgcttttgcataagcctcatcatcaccttcttctgtatgattcatggcaagtgcaagatcatacagtttctgtccttcttcgccctctaatgcgttggtgttgttagaagagcccggctcatactggaatgcaacatcataagggttaccgaaaccagttgctaagttgaacatctgatatgggttctccgttgagttatcatagtaataggtcagtaagtctgtgaaagtaccaacagtctggttgatcttcatacctgctgcttctacatccgggttctgctgtaaggaagttacaagcaggtcagatacagagttattctcagaagagaaccactcgatgactaacggcatgtaagtaccatcgtctaatttcttataacggattccggaacctgagtaatcagaaccatcttcgttgtatacccagccgccatcctctaactctttgactgcagagtcaaggctgtatgtgtaagagtttaatccgtctaattcttctgcgtattcctcagccatccactgctgtgtaccataaggtccgcttacaaccgtaccatgtccaccggtgaatgtctgtgcaaatgttacacggtcaagcaagtaagccattgcatgacgtacttctttgaactgggttggtccctgattacatttgagagaaatcattccataacctgcgcggccatagcttaagtaattgaagttaccctcttctaccatgtcaagaccctgctcgatctgatcaccgtctgctacctggtataagatatcaacagcaccggtctttaactgatccatcatagtatcctgtggtgtatattttacgataacagtttcgatatttgctgtctgtccctcaaagttacccgggaaattcgggttctttgtcagtgtgtatgcataagagttctcatcataagatgtgaacatgtaaggaccggagcagatattgtagtcatatcttgcagcctgtactttatcaccgatatactcagaagtaaagttatcagagaatttcacaccatcctctgtatcctctaaagtaacatcttccggcagccataagtccatagactccggctggttagagatcaaagcctgtccatagtaatatggcataaactgtgcatcgatcgttacagaaaaagtcttgtcatcgatcagatgaagtccttcgaatgtatcgctctcaccatttaaatatgcatcatatccttttacatactgaacagtactgtctgttaagttgcttgcttcgagatccgtaaccatctcattgcatcttaacatgtatgttaataagtaatcatctgcattgatatcagaaccatcactgaactttaagccgtccttgatcttaacagtgtaagttctgcttccgtcctcgttatctgttacttccagattgtcaagaacagccgggttctcgatccatttacctgtctggtctttgtcgatcggagccatacctgtaactaatttgaatgcatcgtaatcagaagcaccgtttgcccagaatggagtaatatctccacttgtctcagaactctcgcctaagattacctgtttgttgctgtaagtaccgttaaaagtactctctgtgccgtctgcagctgcctctgttccctctacagcagcgttgtcagaagaagcgttgtttcccgcatcagcattgctgtttcctgaaccgcatcctgctaccattccggtagtcatggcaccgatcagaaaaagagaaatcagtttctttttcataatagttcctccttatagaaaattgttctatataaaaacgccatggcgtctttataacattatcgttgtagcacgttatcgtgctaaaatatttttgtataagcaaaaaaaagtgccaacagacctctttgcccgttgcactttaaaaatatacaactgtttgttcccgacgaacaacactttttttattatacatgcgagccgttttttgtcaatactttttctcattttcagacatgtataaatataacgctttttccactaatttccattcttttgcattatcattcaagaaccttcctaaatgtatgaattttttttcattattttaattattgggaatatttatattccgttatagatttcaccttttcctgtttcttctatattatatgcatttcaccgttatgctgctttccatctctgtctgcagctgttataatagagatactttgtaatcccattcatttttatttataaaggagacatcaccatgatcacaccggaggacatattaaaccttaatttctataaaaaagaaaaatttaccggcagctacaaaggcatgcgctacctgatccagaaggaccatgaggaagagtccgatcatgacattttccgtgccacttactggccgggtccctataactttgcagtcacagatgattccttaaaaagctctgccacctttccttttacagaggacggaaagctccaggtcgtggactggcttaatgagaactgggaaaaggaaaaagatcattttcagtctttattgctttaaaggattgacagtaccccgctataaacttaaaatctgattaaaggtgttactttagtcctaacttacacagaatgaaaatagtgtgaaaaataagatttttcacacgcaagatttgtgcttacgcacaaacttatgatgccctgaaaaacgggcaggaatggagagattttatggagtataacgaattgtatttcaaagcaaagtcaaatgcaaaagctcgtacggtctggctgatcttaatcgccatcatgactttgtcctatggctctgagacatcccaggggcttcactccgcaaaatattacacaacctttcttctcatggcatgggttccctttttcattggtattctcgtactaaagatcaatggaaaagcttcttctgtatacaaggaaatcgttgccgtcggttacggttcgttttatacttacgtcatccttaccacggattccgcgatcgctttcggctatatcctgcctctgacaagtatgctgattctttttaaggatcgcaagtacatgatccggtgtggtattgccaatgagatcatcgtaattgtccatcttgttttacataatatgtatggaatcaacccgagtatcgtactgaacgattactatcttcagatttccacgatattgctctgctatatctgctacgttgtttccattgaccatttaaacgaatctgacggtgcactcgtcaactccatccgggacaatttagaccgcgtggtaacaacagtcggacaggtaaaaggcgccagcagttccattgttgatggtgtcactgttgtccgcgaacttgctgatgaaaacaggcaaggagctgattccgttgtaaaaagtatggaagagcttacccagaataacgatattctttatacaaaaacgatgtcctccatggataaaacctccgatatcaacatgcaggtgcaaaatgtggcagctctgatcgaaaagatggtaaatctgattcaggaatccatcgagcatgcaaacttaagtgccgaagagcttgccgatgttgtgacaaccaccaacacaatggctgatctgtccgcgcatgtcgaacaggttttagagaacttcaaacaggattttgatatggtaaaggaagagaccggaacgatcgaaggaattactttccagacaaacctcctcgccttaaacgcctccatcgaagccgccagagccggtgctgccggaaaaggctttgccgttgtagctgaccagattcaggggctcagcgtggagaccaaaaattcctccggccgcattcgtgatgcattgacccatttagatgagacttccggaaaaatgacacagtctatcacgcagacacttgaacttatccagacaacacgtgaaaaattaacactcgtaaaagacagtgttacaagtattaccaacgattccacaacactcggtgaaaatatcaaggtaatcgacggtgccatgaaagatgtggaatcttccaatcacgatatggttgacaacatgaaacaggtctgtgataccatggatgtcatgacaaaatgcatcaaccagtcagacgatgtttcccgcaccatgctgagtaaatatgaagaatctgccatcaacgtaaacaagatcgaaaccattgtcggaaaactgatgggtgagcttggtaccggtggtttcatgggaattggcgatgccaaacccggcatgaaagtcatcctgattgcaaagaacggaagctcttctttcaccgctcacggcgaagtgacagaatccttagatggtggaatcacggcacgtctgcatgttccttccggaagttcaatcgataccagaaacaggaattttacctacgaactgcagatctccgtgacaaacgcattgtatatctgggaaaatgctgagatcaccacgatgcgtggtcagtcgtccgatatgtataagattacagttacaaccaacccgaaggttgttaaccggcgtaaatatcctcgtatgccgatctctaacaaatgtacgatcacggtaaaacagaacggtaaacaatataacggtcagatgatcaacatcagtgccggcggctttgcattcagtgtccgtgataatttcttttccagtgcgatcggttctgatatcaccttatcgattcctgatcttccggtggaaaatgcccgccagttagaaggtcatatcatccgaagcacagacaatgagaacgtctttatcgtcggctgccgtatgccagaggataatacagcggtcgaacagtatgtacaaaacaattaccagggtgagtaaatctcatatgtcataaataaaacagcggataacaacttcttttcttgttgttacccgctgttttattatttgtgcctgttaatttcttcttatttacttttattccttatacaataaaatgctctacgttctgctgtaacttatctgctgcatgatgagctgcttccgctttttctttaatctcggctgccttctctaccacaacacctgtcttctctgcgatatcgttcgtaccggttgctccctccgtagctgccttgcttacttcgccgatggcatccataacaccgttgattgatgctaacagctgctctgaggatgctgagaagtctgttaccagtgcatcaatacttcctgcatcattgctgtaggaatccgccatatcggagaatcccgcaaagctgtctaccacgtcggttccaacaaactctaacaacttctttgctccgtctgcaagatttgttaccgattccacaacattctttgtcacatcctggatatgtacaactgctgcctttgactgctcggcaagtaccctgatctcatccgcaacaactgcaaatccctttcctgcctctcctgcacgcgctgcctcaattgaagcattgagtgctaacaggttggtctgtccggtaatctccataatggactctgcaagaacaccgatctgatcgactaccttgatatcttcaagtgcttttgtcagtccctcattgatctcggcatggattgccttggtacgctcatcattttctgttgttgtctttttaatacctacggcacggtcacggatatcatctgcttccgttgcaccgtcctgtgaacgtgttgcaatactctttgctgcactttcgatctcatgggacattgcattgatctcttcggaggaagccgctgtctcttccatacccgctgcaagctcttccgtcgttgcggaaacattctcgatttcttcgtctaatgcctgaatattatcatcgatctcctgtaccattctggtgatctcagttgcctgactcttgacctcaccgatcagtccgctcatctcatttctcatggactctaaagatgctgcgagttttccaaaatcatcgcggcgctttaacagtgccgttcccattgcctgtgaaaaatcgccctgttccatgacaccgatggaactgatacattttttcagtggtctgatgatgctgataatgatcataatcagcaataaaactactattattccctcaatcaacgttgagataataaacagtgtcatcctgcctgtaacataagaagaaaaatctttttcaattgatgctacctgatcatcaatataatccgtataatttccggttccgatcacccatccaaacggttcaaatgccttactgtaggaacgcttcggagaaggttctgtctctccttctttcgggaatacataatccgtgtatcctccgtctgcctcctgaccgacacggatgatctcttttaccatctggtatccattggcatctttcgtctccatacgattggtgccttccgtgtcatttcctaaaagcaccacattggttccgtcatactgatccacccagaaatatccggcatctccataacgaagctgtctgatctcatctgctgccaatttctttgcttcctcttccgtatacacaccagcctgatactgatcgtaaattgtctggcagagcgaaatcacattgtccacctgctgtttgatctgttcgtcgtaagatgcgcgctcatctgcttccagcgtttccagtgctttactctgcagctgtttcatgctttccgatgaaataatggcacacaacaccagcgccactatcgtcgtcagcattacgataatcagcttcgtctgtactttcacattgttcataaattgttcctcccacttacatactttaatctcacggaacttacaaacatgatgtatagatttttctatatatcatgtttgtaaactccttgttgttattgtaccatattttacaaatttcctcaattattttacttttattacagggatttcgctttaacttttttatctatgcatttttataaacaatccagttatcagcattccatctgcggtcacccttcgttcctggtcaatacgcacaaaattcccccctgctttttccttatatattttttctgctgattttctatccgcctttttcatataaaatctgtttcactttttactgtgttcatatcccgtataattctgctgtgtattactatacagatcaccaatccatgcaactcataatcatacatattcgagtattttagattaaaacaatagccggaaagccttgattttacaataaaatctcgactttccggctattttaaatcaatgcgggtgacaggacttgaacctgcacgtcggggacactagaacctaaatctagcgcgtctgccaattccgccacacccgcaaaccactttgccattatatcttagcactcataaaattgcaagtattttttcacctgcatcttagcccgcacctctgctgctcagagtaaataacggcagtttactttcggtacaaagataacggcagttccaggccatgtgcctccagcagcttacgatcacttaaaatctccctggtatccccatcacacacaattctgccctcagacaataaaatcgttctgtcacaggtatcccacacaaaatccagatcgtgcgaagctatgagtttcaaataagaaaattcatttaatacccggatcagatttctgcggttttgcggatcaagtgccgccgacggctcatccatcagtataatatccggtttcatggaaaggattgtcgcaatcgctgccagtttcttttccccacccgataatttgtggatcggtttttttgcaagatgcccaatatggactgcagcaagcgccattttcgttctgtatgcgacctcttcttccggaaggccgtaattctgcggggcaaatgccacatcctcgtatacatttggcataaaaagctgactctcagaatcctgaaatacatagccagctatttttctgatctgtgctaacgtttctttctgcaacggcacatccccgatgcggatacttccggagtccgggaaatacagaccgacaagtaattttaaaagtgtggactttcccgccccgtttgcgccgaccacaccaatcgatgcctgtccgtctgctgtaaatgaaatatcctgcaggatagggttttgtttttcataagaaaaataaagatgtgttacttctatattaatctgtcccatatacttatgtcctctcttttcaatctgtcacagaaccgtcaactttctttgactgctaaaacatcgttcctatcatctgtccaaccgcaaaataccgcaatacagcaaatatcacgatccataaaacaagatacactgcatccctggcacaaaaccgtatctctttttttaatctgaataccccatcaaaaccacgcaggcacatactctcatagatcacctccgcccgatccatactccgaagcagcatctggcccatcagcgatccccacactttaaaatgaatgcccttctgtcccggtgcccgaagttcatacgcctgcacgaccctctgcgtctctgccagcaaaacggaaatataccggtagatcagccacacctgcatcacaagagactttggaagatggcatatctcaagtgcacagcagattttttcaatcgtcgtcgtagcgatcagaagatacgatgccgaaaccgtaaaaacaccttttaacatcagcgtcagcatggaaatcactccgccggtaatttcaatctgtcccactgtcatgacagcctgcctgtcaaaaaaagggttaaatattcctgccacacagacaagcggcagcacgacccgcattctccacagcgcatccttcaccgaaatatcattcataataaaaagaataaccggataaactgccatcacaagcagtccgctcaggttatacttcgaaaatgaaacgaccgtccctatatacaaaattgtcacacacaattttacaagtgggtgaacctggttcacccacctgtcttcatttgccagttcctcgatacttttgatctcagaaactgccttttgaattttactcatgtttttgattctttccaaaaaatttaaacaaatagcagcctccaacacagacagccacaactaccgcagctcctgccacacccgaaaacgatgttcctgccatgctctcactgtttttaaatgcataatccggaagcagcgctgtccactcctggatatctgctgccttttgatatgccgcccctttggcatctagctctgtggttccggcaactttctccatagaccattccagtccgtccggatttgccgaagcaaacaaagagagacctccaccgatccaaacggttaaaactgcaaggatcgcaactgtctttttcaaagaaaaatgtgctttttgtctctgtgtactttcatccgttccccaaagcagctccggtctcgcatcatagacaaagcaaagcactgctgccgtgatcagtccttctaccagaccgattgccagatggatcggctgcatcactgcaacaaatgtctgaaatggaagctccgtgataccggaagctaacgtctctaatgtaacggaaaatgctccaagctgcagcgtcaggacacagccaagtacagatgctacaacgattttctttttggatgccccacggcgcatcatcggtttccagatcagcagggccccgataaagcacccataaaatgccatattccatatattgcagccaagcgctaaaagccctccgtctgcaaacagcagacactgtatcaaaaggactccgatcatcgtaagaaatcccgcatacggtccaagcagtgcggagagaagcataccaccacacagatgtccggatgaccctgttcccggaatcgtaaaattgatcatctgagttgcaaaaacaaacgctcccatcacccccataaccggaacctttttaggttcatttaatgcccttacctgtcttactgaatatccgccagccgccgctgaacaaagatacattgttgttgcaactgccggtgcaaccaacgcatctgccatatgcataccaaaataccacctttcatttatctttgaccatattagcaaaaatctggtcataccacaagccttttatcacagatatttggttgatacttttaatttttcccaactaactcacatcctaatcccttccattcctgccataatgctcctattgcgaaaatgttacataattgttacaatcttttatgtgatcggccgatacacacaaaagattgcaggatcatcgcaatcaaaataaaaataaggaggacgaaactatgtgttttaatttcaatagctgttccgagttatttaatgctatctgcaaatattttaacctcggttgttaataatagcttgtgcacttttccagcagactgactgccagaaatatatgccccgggcatctgcccggggtatttttcttttatctgtctaaatatcaattcctatacagcaaaaatctacttttttctaaatatacttatctgtctaaaagcagctctcccagccacatggcatttttatctttttctgaaatgatatattctccctttggccatgcttcgcctttccagacgagatccgggtcatcataccgcacggcctgtgctgcctccccgcaaaaatcctgatccacacaccactgcatcagtgtatcatcctccaatgtcagatacccgtgggcaaacccctttggaatatacatcattttccggttttcaaaagataaaacttcactgtatgaatacccaaaacattttcccggtcttaaatccacggcaacattaaaaatcgaaccatgcaggcaggaaaccatttttgcctgtgcatgctcccccatctgaaaatgcagtccccgcagcgtaaatgcctctctgctgtatccctggttgatctgacagacctgaaatggaacatccctgtcatacggaacagacagatatccccgaaaatcttcaaacgcaggcggaataaatacttgtggtttatctgatgaaaactggctcatttttgcctcccttggcatacattatcattacactaacttgccatccccttgccatccataagatacatgatcctgcggacacaatgtggacatgaaaaaaacagatactctccaacccacacccaacccaatcgaaaaaagcataaaaaagaacggaagtgctgaaaaatcaacacttccgcgttttcaaatcgtgagacatcggggattcgaaccccggacaacttgattaaaagtcaagtgctctaccaactgagctaatatcccatatttttaatttaagctgggctagcaggattcgaacctgcgaatgctggaatcaaaatccagtgccttaccgcttggcgatagcccaacaagaaatataagatcaacatcctaagatgttgtcatatttcaaacctgttgcactagtcgcaacaaaggtggatacagggattcgaaccctgggcctccagagccacaatctggcgcgctaaccaactgcgctatacccaccatacggctataaagcctgacaccttattaaaataaggaaatgtgctcgaagggattcgaacccccgacccacggcttagaaggccgttgctctatccagctgagctacgaacacatttatcacatctgcactataacaggttgcatatcttcataaaaaatctgttatatattatgctttccataataatttgcaaatggaaagcgggtgatgggaatcgaacccacgtatccagcttggaaggctggtgttctaccattgaactacacccgcacacgatcggggtgacaggattcgaacctgcgacctcctggtcccaaaccaggcgctctagccaagctgagccacaccccgatatgaatttttatcctgaaaagcaagtcattcaagtgcttgtcttttccgtctcatccgtgacgcaagagttattatataggacgcaaacataaatgtcaacacttttttttatattttttcaatttttttaattttttctataaatactcgatttcataatgcgccacaccctttttatcaatgtccatcaggatatacgaagggcgttttccctcctgtcgcggataggaaatacttccagggttcatgacaacgattccgtccccgtattcgatcagcggaatatgtgtatgcccgaacattgcgacatccgcgccccgcgctaaagcctcacgctttaaatcctctatccctgatccgacatagtaataatgtccgtgtgtcataaacacacggtaatttcctgccatgatctccttttcacgtggcagagaagagaaaaaatcattatttccagccacaatttctaatggacagccacaaagctccccaatatagtcttcatacccttccgcatccccgagatggatcacaagatccaccggcgaaactctctctaaaacaacttttaaattttcatgttttttatgcgtatcactaataaccagtactctcataaggctacctgccccatcctatgtatttccaatccccgtttttatacatcagattccatactgattcaatttttccttcatggcgcgcagcgcctttcccctgtggctgatctgatttttctgtttctccgtaagctctgcagtggaacatccaaactcatccacataaaaaatcgggtcatatccaaacccgttacttcctgcaggtttttctccgatataaccttctatcgtttctcttgtaaccagcacatctccatttggcattgcagcagcgatcgcacagacaaaacgagccgtacgcttttccttcggcacaccttttaaccggtctaaaattgcctgatttttgatcgtataagaggtatcttcccccatatagcgggcagaatatacgcctggttccttattcagataatccacctcaagtccggaatcatctgcaaggacaatatcttttgtaaaatgtgccactgcctttgcttttattctggcattttcctcaaatgtcgtcccgttttccacgatatccgtctggatcccggcttctttcatagacaggatctctgcatccatatcccctaaaatttctctgatttctttcattttaccggcatttccggtcgcaaaaataattctgttcattccgcttctccatttccctgtatgacattggttttcacactaatatccttcttcaaatgcacgcaatatcgcatgatagataccaagtgctgcttttttctgataatcctccgaccgcagcagatcaagctcctgctgattggtcataaatccaacctcgatcagcgcaaccggaaccttgcttgtccttataatatagatactgtctccctcaacaagaccacggtttctgctctgtaactgtcccgttacttcctctaaacagatctgtgccagccgcttacttccaagttcgctctcatccgactcgttatacatgactgctgtaccatttgccgaggacattcttccactgtttgtggaattgttatgtacgctgataaaaagatcggcgtccgacttatttgcaagctgtaccctctgatcaaaagtagggttgctgtcgtcggttctggtataataaacaccgatattgtgatcatcctcatcaagtatcttttttaactgaagcacaatatcaagatcaatttctttttcattgaccccccgtttgttcgctcccggcgcacggcctccatgccccgcatcgattacgactactttatcatacacttcctgcggtgtcaaaaaatcaaaataataatatgcactgtcatattccgtttttaattcataaacatgatccattacgatctctatcacaccatcttctcccttgctggaataagaaagtgtcgcaatgtgattactgcttcccgtaatcggtccgttttcaaaataagagcggtctgttcccggaatgctgatttttatcgtctgtgtcacataatcatttgtaaattgaatatcagatccatttatgccctccggcagtttcaactgcagctgtccgccatgaacctgttctgatgtatctgcagcaacaatttcaagatctttcatctctgtctggttttccgcatattcctgctctgctaaacgctcttcccgcgattccactgcccaggtatggatctgtggaaaaaacggaagtccaatgcagactgccacagtaagcaccacaacaactgctgtcgcaaattttaatattttatcttccatgtaataactgctttctatcgattatcactgaatgccttgatacagagattggatttctctacggtatcaacactcacccatttcgagccatttgcactgatatagctctctccatcatctaagtctacattttcagtcgcttcatccgcagcatactcgattgccatcggatgtacggatccgggtgtaattatatacagaacaaccgcataacgctcccccgcatccacttcaattccctggttaaagtcaacggtataataaccggcattcccaagcttgccggacgcaaccggaatcatcttctccaacgatgtctcatcctcaaactgacgcaccacatataattcatactgtgagtcttttccagtcgcataaaaagatgccgcctttaaggtttcattcccctctgcggtaaatacattggcaccgtagatgctgtctttattataaccaagctgtccaacccatccgcacagatcactctgataaatgtgatcataattatccgtgttttctatatccgtataaacaacattatgtgttccaatgtttgtatcataataggaaatataaaagaagccgttttccccgaaattatctccccagctgttctgacagataaatgctccatcaccctcgagatcagtgttaaaattatccttagaataagaatcatcccatccgacgatcaccacatcatggtttggtttctctgtaccaatatagcagtatgcatctgtgcttttgttataatatggggaggaagactgtgaactgcgcagtgcattgtaaatggatgtctgtactccgccgtatttgaatacagcttccttgatcttttcataatctttgctttcaatgatctgcatttcctgcacatgttttaccgcggtaagatcctcatttgtctgattatctccataaggatcatctttttcatagacaggtcccttccatgctgcaagatatgccattcccatggtatattccccaccgtcattctgcgtcatattaaatccgttacagagtgtcatatgatccacagaatactgctcactctcctccggcagaagcgatgattccagcgcccctaacgccgcaaatgaccagcaggttccataacttccctgattacgcacttctgatgtccggtttttcgtccgcagatcataactggtcggcacgatcgacgcatctgaattatccgcagcctgtgcctcattttcctgcatgttccagctatatgtataatccatatattgtgagagatcattgagactgacataatactcattatctatcatggtaaacggagaagtgatcttttcaatgtccccattcacggtcgcagtctcctgatccagggaaaatgatatgttgctggaatgtttttccaccacaagcctgtccccgtcataaatatgtgcgctgcagtttaaggcatcccgcaaaatggaaaccggcatcataatgtctaaattgtcatccatataaaatttgtatttctcattggtatactgtttattatcaatgatcacagacagcagattatcattcacacttgatgcaatcagcggattccaggtttctgcttctaaactcgctccgcggaaactgccgatctgctcatactcagcaccaggtatattatattttatcaaaaaagcaatcgccacaattccaccaaaggcaataaatcttttcgaataatgcatgaatcagaatctccttaatgaaaattatcccgttttggcggtttcggtcccataaactgataaaaatacgtctttaacattccgttgtagatcttgcggtttttatctgccttccgtcctatgtaacgctcggtgtcctcataactggtgatcagatacatagaccatgcatccagtctgcggtaagcctccccgatctgactgtataattccggcagatccgccttatcctctaaacgctctccgtatggcgggtttgtcacgataaaaccgtatttctttggatggtgcagttctgccactggtctctgctggaaatggatcaggtggtcaactcctgcacgttttgcattctcccgcgccgccttaaccacatcaccgtcaatgtcatatccctggatatctacggtaatgtcatcatttaccatgtcctgtgcctcttttacgcattcataccacatcttacggtcaatgatgtttgtccactgctctgccgtaaattcacggttcattcccggtgcaatattagcagcgatcattgccgcctcaatcggaaatgtaccacttccacaaaacggatccacgagaatacggtccggtctccacggtgtcagcataagcagggatgccgcaagtgtctccgtcagcggagccttgctcgttaaagtacggtatcctcttttgtgcagagaatcccctgatgtatcaagtgttaccatcacttcatcctttagcaggaaaatacgcaccgggtacggcgccccatcctccggaaaccactccttatgatactgctgctttaaccgctccaccatcgcttttttcgcgatcgactgaatatcggacggactgaacagtttactcttgatggaggatgcttttttaacccagaacttaccgttttccgggatataattttcccatggaagcgctttgattccctgaaataattcctcaaacgtttctgcatgaaaacgtcccacctggatcaggacacgttctgccgtgcgcaggaaaatattcgcccggcagattgcttcctcatctccggtaaatgtgatccttccgtcttctactctgcctatctcatagccaagatcataaatctctcttttcaataccgcctctaacccaaaatggcacggtaccacaagctcatatgttttcatgaattctccttaactgtttcttttaccttagtactatattatccgttctaaaataccctgtcaatgttaatcataaccattatagcgtctgattgcctgcattcctccaacaacggtatacacctcatagccatattttgaaagctgtcttgctgctaaaagactcgtactgccatattcacagtaaactaatagtgttctatttctgttaaaatgccgcatccacccatcgatctcctcatatggacaacagtatgctcccctaaaatgcccttcccggtaagattcccgttcccttacatccaacaccagggcatgcttatttaaaataatctgttccatctcgcgtggatggatcgtaaaaaaagccatactccctccgaaataaaaacagattacaaagctctgccctgtaatctgttcttctgctaatgttttttccttacattatatgcagtttccggtacccgtgttcttattttgatacgttagaacctgtactgttctgtccggatttattctgtccgttgctgtttgttgctttgttggaagacttattttttgagctgttctgctcataactattctcatagctgtcctcgtaactgtttctgcaattagatccactgtttgcattgtctgcattctttgccatttctttctccattccggtgctgttctgcaccttgtttactacaatttcgcttacatgcaattttccttacacccaattctgattacgcataatctttcttacacgcaattttgggtacatgaaactttaattacatgaaacttttattgcaagaatattatgggaagaaattctctaaattatacatacagttacatcataaattatacatacaattacatcatataatattctaaattatccttcagttcatccgtgatcttaccaccggccttctgatatttatcatagactcccttgatacgctgaatctttttcgtaattaaaatatcatatttctgccatgcattctgatacatcggattggactttaactcttctctgatctccttggaaaatggacagtatgtcacaaggatctctcttgaaactttatttaaacggaagcttccctttgattcatatttgatccagttctgataatctttcacaaacacctcgcggtaattattttttccacgaagcaatgcactttttatcttctcttttgcctcagtcgaaagatcatgattcttcttataaaactgaatataatcacaatactctgccgtcagggatttatcgcggatatcattccagtgaaccccttgaattttacgacagatctcccaacggtaacggccggtcgtttcaaccatcatatcatcgagatcaactgccgtaaaaatagggaacatatatcttgccggtgtatcacgtctgacccccgctgtttcctgccacatcatagctcttgttccagcgttcggcatcagaataatattcggaagtacctctttcatgatctcctcgcgattgattcccttgtccggatcagaaaatacaacgcctctgtaaaatacggaaaaatcaactttccgcactttattcatggcatcttcgattttctgtgccgtaacgagcatcttatcaacggaattgatcagatcattttcgccaaggatcggacagaatgttgaaactctgccgtatgtaacacggtttccggaagtaaacatattctgtatctcaaattttaccttcatctcacggttattcgcataatcgcgcatctgtttttcatttacttttccggtctttttcagttctgccagatagcccgcataatctaagtcaaattcgttttttgacggttcattctgaccgttataaatcgtttttaaccattcaaaaatagtaaaaatatgctctgaattgcaaagttctaaatgttctgtcagatcgtaaaggatattggcattatcctcacctaccatctgtacatccataaatccgaaattcaaaaacatctctatgatcggtgtcggttcatcatcatctttcatcacattcataaatactttataatatgcatcataaaagacctgtgaaagctgttttctaagctggaacacttccgcatccgtggaaagcatatccggaagctccctgtatttccggatcagattacgcatatcttcgatccgttccggtgtatatccggcataggtcaggatatgttctaagcagtcttctgactcttcttcctcttcatcccactcatcatccgaaacattatcatcttcccccggcgtcgcaaactcatccatcgcatactgggtaaagtcgtgatttttgtattcattcagacgataggataccagtttgtcatcatagatatttaatttgcggatcacttccgcaattttatccatacgttcttttaacggcgtcacatcataatgattcatttccgcctgtattacaagttcaaaataaagatgaaataaatcgttttcagattctgataacaggatatcctgattatattttaaataatcaaccatctcgataattccctgcatcactcgccttgtctgataggaagcctccataatagccccgatacagagactgtcgtctttttgcatgagttttatgtattcatcaagatatcctttttttgtaaggcttgtactgttattaacctcccagttttctgccatatgtaccatatcaagcggtttaaagttgtccatcctcgtaaacccctgtccatcgatacgcatctgactgcagagcatggtatagtcgttatattccgtttccacaaacgtatggaactgtcttaccagatttttaaatccagcatacatctcaagcagcatctgcctctgctttaatgcagcacgaagaagcgtgcctctcatactctcctgcccatttaatgcattgatcagatcatctgctgtattgtatggaaaaactgcaagcacagaatcttctctcgcaatataatcgcacaaaaaccggtctttttccgagacaccgatcacactttctttgttcagaacaatcctcgcataggaatttctctgtacgaccgaaccttctaaaattaaataccatgcttttactttttctttttgttttgcaatgatctgatttttctgtactttaatcgtttccatatatcctgtctcctgtcagcttttcacgctgcaacactttttgttttacaccgccattattttttgtttttcttaatttttaacaattcatctagcagacattttgctgcttcgtccttactcataagtgcaagttctttttcccagtcttctgtaatcagagtcagcacattggtatcaccagcaaatccggctccctgctgttttaaattatttgcagcgatcatatcaagatttttctttttgcgttttgccctggaattttccaacatatgctctgtttccatggaaaatccacataagaccgtattgcctttattttttccgagttctgcaagaatatccgtcgttttttccagtgcgagtgataactcaccttctgattttttaattttctcatctgcggtatgcgccggtgtgtaatctgccactgccgcagcctttacgataatgtcctgttcttttgcacattccatgaccgcctgatacatatcttttgcagatgttacgggaaccgtttttacaaacatcggcggttctaatgccgtcctgcctgtaaccagtgtcacttctgcacctcttaacattgcgttctttgctatggcataccccatctttccggtagaatgatttgatataaaacgtaccgggtcgattgcttcctgtgtcggtcctgctgttaccagtactttcagtccctgcatatccttctcaaatgccagttcccttaaaacatactccaccagcgtctcttcagacggaagttttccatcaccggtatcaccatttgcaagcatgccgcataccggatctatcatctcatacccatgccgcttcagtttttccagattctcctgcacgatcgaattgtgatacatattatgattcatcgccggtgcaaccagtactttacaggtacatgccatcactgtcgtagtcagcatatcatccgcaatcccgtttgctatcttaccaatcacatttgcagttgccggtgcaagtaatacaagatctgcctgctttgccaatgcaacatgttccaccgaaaattcaaaattacggtcaaatgtatcaatcagacatttattgccggtcagtgtttcaaatgttgttgctgtaataaagtttgttgcattctgtgtcatcagaacatgtacgttacaatgcattttctttagcatccgcgccacattcggcatcttgtatgctgcaatccctcctgttacaccaagaagtactgtctttccctgaagcattttattttcctcctgctctcgttcttttacgatacgatgctttttaaaaatattttatactgtttttgtatatttcgcaacaaaagatttcatgcgacaaattacatgcaattttctatgaatcgagtaggagggaaatctgagtgatttcccgacctctcacaccaccgtgcgtaccgttcggtacacggcggttcaatcaacttaacaagtaac

SEQ ID NO: 5208 - DNA, 1734 bp, Unknown
  gut microbiota DNA sequence
aataaaaatgctggcattgacacgaaaaaaaggtgagtctctggtggtaaataacaatatcgagatcacagtacttgaaatccgcggagatcaggtaaaaatcggtatatctgcgccgaaagaagtgccgatataccgcaaggaagtatatcttcagattcagaatgaaaataaggcagctcttaatatcgatgcgatcgcatccttaaaagatctgctctaaaaaataccggagcacataattcacaataatagaatgacctcggagcgtgcattctattatacaggcagaaaaatgcggctccggtattaattttatacgcaaagaaaccgatataaattgcagattaagtaaaagtatgcgcatagtttggtatataactgacaaacgcagacagacacagggaagtgcagattacagcagaaagaagctgagaataccatggaaacggaggtcaggatcatgggagttcaacggatacaggaaacatcgacagcatcttacggcaaatccgtagagacagctgcagcaggaaatagcagtgctgcaggtagcggaagtgctacaggcggtacaacgcagacagtggagaacatcacaactccatggaaggcagaaaacaaaaacagtacggataccaaaaacagtctgagtgccagaaacgacaaggatgaggagcaggaaacactcgtaggagcaggaaataacacccagatccgcaaagctgtagaagaaattaataagaaagcacacaattcggaagcagtctttggcattcacgatgccacgaaccgcgttatgatcaagattgtggacaaggacacgaaagaagtcttaaaggaatatccaccggagaaaacacttgacatgattgcaaaggtctgggaagtcgcaggacttttagtggacgagaaaatgtaaacaaagacagtacagtctgtctgcagagtatataataacagatgaaaagtttcattagataggagtgataatatgccaatcagaattaccggtctgacatcaggtcttgatacagagtctatcatttcagctctggtatcttcatacaactataagacgaataaatacaaaaaggcacagacaaaattatcctggaagcaggatgcgtggaaaacactgaatacgaagatttacagtctttacagcagcgtcggcagcatgaaattatctaccgcatataatttaaaatcaacaactgtttccgattctaccaaagcaacggtaaaggcaggaaataatgcaccgaccggaacacagcagttaaatattcttaaagttgcgcaggcgggttatctgaccggagcacagctttcaagcaagacgacgacatccacaacacttgctgaactaggttatacaggtggagatgcaaagatcaacctgacaaagggtgatggtacaacaaaagagatcacattaacacagggatcgacggttagtgatgtgatcgcttcattaaaagatgccggtgtcagcgcaaactatgatgcgacaaaccatcgtatcttcatcagttccaaagataccggaaaagataacgattttaccctgaccggtgcaaatacagaaggtgcgagagcactgtatcagatgggactggctgttggttcggatgcaacaaatgcaacatataagtcttatacgcagtactatgatgcagatggtacacaactagaacagaatgttgtgaaggccatcgagaaatatcagaa

SEQ ID NO: 5209 - DNA, 2934 bp, Unknown
  gut microbiota DNA sequence
ataacgtccaccgccgccacaggctgcgccaagctccggcatggagatctcaaaaatggttccggtatagtagctcataccacgaaccaaagtcgggtcaaataccattttaaaggaagccgcctttgcaccctccacggtatcgatgatctctaaaagattacgctccacctcaggatctaaatatccctccaaagtctttgcaaggtatttgatgccgttttctgcttcctcaacacctttaaaaagtgcaagatatttctcgatcgactcttttgcataaccctctttttcgagttcctctgccacgccgtcaagaccgatcttgtccatcttatctaagatgataaatacagtatcgaaatcttcctctgcaaatccactgtatgctgccatcgcctttaagatccggcgctcattgatgcggatctcgaaattcttaaatccgagttttccgatcgttgtagttgttgctaagatcagctcgatctctgcaaggttcgtcggctctccgataatatcgatgtcacactgcataaactgacgataacgtccacgctgcgggcggtcagctctccagacatttcccatctgaatcgccttaaacggagatggaagatcatttgcattattcgaataaaaacgaactaacggaacagtcagatcataacgcataccaaaatcaactaaatccgcttcttcttttgcttcagcgactttcagcttttcaccgcgcttcattaccttaaaaatcagtttttcattttctccaccctgtttattgctcaggtttgcaatattttccatacaaggtgtctcgatcggcgtaaatccgaaactgcggtaagtctctttgatgacttgctgcacataatcccggatctgcatctcctccggtaaaatatctttcatgccgttgaccggctttttacttaatgccatgaaatttcctccatcttctgtctgaatatcctttgcctattatacgtttcacagttgtatacgtcaagaactgtcctgtgtacagtacaaaaaatcttatttttatgttacttcaatgtcatttcgttaagttacagggttagcccctaactggtggtctaatccaaattttttcaaaaaagttaccaaaattgaagagttgtcaaaacagtacctgatgaacaccactactttgaaatccgttttcaaagcagtctatggaatgcccatcgcttcttacatgaaagaataccgtatgaagttggcatcgaatatgctgttgcagaaagataaatctatttcggaaattgccgccgctgtgggatataaaagccaaagtaaatttacatcggctttccgagatatatttcagatattacctactgcatatcaggaacaagtatcctatacaaatgcacttgcaaacgcttgaaattataggatttaaggagtctgtgaagaaatcaaatacatagcactgtaaaatcaaagtaaatatttcgatcaacagaaccttttatgacaacatctctttcacacaagtacttcgataatcacttggtgatattttatatctttctttaaatactcggttaaacgttctctgactttcaaatccactatccagacaaatatttgtaatagaatcactcgtattttccaaacgatggcatgcatagttcagccttgcatcgttaagatattgattaaagtttctatggaatgtcttggaaaagagtctggataaaacatatttgctcacgcccaggtcttttgccatctcttccaacgaaaacttcttcttgaaatttgctgatatataggaaactgtctggtaaataagatcgttgctccccacactgctcttttctaccaaatttaattttcctatgcagcgtgccaacacaatttgaagatatgcctgtgtaacagtaatatccgactgttctgtctctaaaattgcatttataaccctatatacctccggttcaaccttttccgctttgatgattgggtattcaggagccatggattgcatgatatctgcaaatttggctatcgcaaatggcgatgcaatcagataagtcgctttatttacaccgggtgtcagtacctgatagtgatgaataacatctggaaatacaaagcctatatctcctttttccatatggtatagttcctgtccaacaccaagttctaatgatccacttgttacacaaacgatctccagtgcattatgaagatgtggttcaatatgttttgacttcctatttattgctataatctcctcttttgtgtcaacatattttaactgcatgaaatactcccctttgcaacatttgtctatatcttctttcgatttggcaagcaatccttttacacctatcttataatcaacttgtaaataaggaaaggaggaattgcaaatgagcaacctaaaaaaatatctgaatgaccttttagtattctacactgaatattttgagcatccttaccatgtataaatactaaaaggactatttatagaaaaaagcactgtctcatcgagcaacgaccagacaacactttctcctgtcaattctaatttatgtctgatgcatctgttacttcgtctgcagcaattcctttttctgctttcagttttttatttgcatcttctacattcattcttgaaagtacaaacataatcaatacatcaaagattaacggaagccaaagatacatgaactgcatcatatcaagtgcagactgtggctgagttgcatttgttccgacatatccactgaactcaagcatccatccaacaacagcggttccaatacctccaccgatttttacaccaagagaagtacaagagtacatcgttccgtcaattctctttccctgcgtaagataagtgtattcagagcaagatgcgataactgcattcatatctccctgccatggtccctg

SEQ ID NO: 5210 - DNA, 39185 bp, Unknown
  gut microbiota DNA sequence
tgcgtgaggtaaaggaagagacaggtctcaccctgacatcttaccgcgcgcggggcgtcattacctttatttccaacgagtggggtatcgaatatatgcacttatttacggcagaccagtttaccggggagatgactgactgcgacgagggagaacttgtctgggttccgaaaaaggagatcaaagacctgaaactgtgggaaggtgacaaaatattcctgcggcttttggatgagtgtgaggaatatttttcgctgaagctggtatacgaaggcgatacgctggtcgataaaaaacttatcattgccgggaaagaacagaaagcagagtgacaggccggtaacaaaggagagaaacatgataacaaaaacttacccggtcggcaccctgcctgcttataaatatgtagtagttttatctgaatatcagggcaaaattttgttgagcagacacaaaaaacgcaccacatgggagacacagggcggaaagattgaaccgggagagacaccgcttatggcggcaaagcgtgaactttacgaggagtccggggcagtggattttgagatagagccgttgtgcgactattgggcgggagaggtgcagaccaaagaagaaggaaatggacgtgtctttcttgcaaaggtaaaaaagctgtcagccatgccggaaagtgagatggcagaggtacgcacctttgacgaactgccggaaaaactgacttatccggcgatcacaccgacactgtttgagcggaaaaaacagggcatcgggaaacgtctgctttacggcactggaaatcctgcaaaattaagtctgatgcggaaaaatttagaacagctgcagatagagatcgttgggttatcggatattgatgtggcagtaccacaggcagacgaggatggcgattcgccgctggaaaatgcaaggaagaaggcaaagtgttattacgatgtttttcagattccggtgttttcctgtgacacaggtctgtattttgaaaatgtcccggaagataaacagccgggcgttcatgtcaggagggtgaatggaaaaaatctgtcagacgcggaaatgcttgcatattacagcggacttgctgcagagtatggtggtctgcatgcatactaccgcaatgccatctgtcttatcatggatgaggaacatatttatgagttgatggatgaaacgttctcgagcgaaccatttctgatcacgtcggtcccgcacccggatggaatccgcagggagggatttccacttgactgcctgtcggtggatcttacaaccggaaagtactattatgacctcgatccggcagaacttggaaaggttgccgcagaagacggaagtctgcggttttttgaaaaaataactggtattttcccacacaatatgttataatcctaaaatgactgtgatagtcgtagtacgcccttttttccgaaagacaggcgaaacccttgaaaaacgggggtgctcgacaggaacatagaatgaaatgaacggaaaaaagtacatcaagtattcatataaagtttgaaggaggaaatgagtaataatgagtgtacaggtggaaaatttagaaaagaacatggcaaaacttacgatcgaagttgcagctgagaaggtagaggatgcaatccaggctgcatatatgaaagagaaaggaaagatcagcgttccaggtttccgtaaaggtaaagtgccgagaaagatgatcgagaaaatgtacggagcaggcgtattctatgaggatgctgctaatactctgattcaggagaattacgcacaggcagtagaagagagcggcgcagatgttgtttcaagaccttctatcgaagtggtacagatcgaagctggcaaacctttcatcttcacagcagaagttgctgtaagaccggaagtaaaacttggcaaatacaaaggcgtacaggtaacaaagatcgatacaacagtatctgatgaggaagttgcagcagagcttgaaaaagagagacagaagaactccagaactgttactgtaacagacagaccgatcgctgagggagatacagcagtgatcgatttcgaaggattcgttgatggtgttgcatttgagggcggcaaaggagagaatcatccgcttgagatcggttcccactctttcatcgatacattcgaagatcagttagtaggaaagaatgccggagatgaagtagacgtaaacgttacattcccggagaaatatcaggcaacagatttagcaggaaaacctgcattattcaaagttaagatccacgaagtaaaagcaaaagaacttccggagttaaacgatgagttcgcacaggatgtatctgagttcaatactttagaagagtacaaagaggacttaaagaaacacttagaggttcagaaagaggacgaagcaaaacgcacaaaagaggatgaggcaatccagaagatcattgacaaatctacaatggagattccggaagcaatgatcaaaacccagtgcgagaacatggtaaatgaatttgctcagagacttgctcagagcggactttccatggagcagtatatgcagttctccggtcttacattagacaaattagaagagcaggttcgtccggaagctgagacacgtattaagagcagtcttgtattagagcagatcgcaaaagacgagaacatcgaagtaagcgaggaagagatcgacgctgagatcgagaaaatggcaaaagcttatggcatggaagcagacaagctcaaagaatacatgggcgacgctgagaaagaatccatgaagagagatatttccgtaacaaaagcagttgatcttgttatggagaacgtaaaagaaagagcaaaagctaagactaagaaagaaaaagaagcggaagctgaagaaaacgcagaagaaaacgcagaagaataagagaggcttcgtcgaaagcggacaacatacaacagactggctcattcgggccggtctgtttaagcatataagcaataattaaatttttataaacaaaatggattggaggaaaacaaaatgagtttagtaccttacgtcattgagcagaccagcaggggagagcgtaattatgatatttactcccgtttattaaaagacagaatcattttcctcggagaagaagtgaatgagacaacagcaagtcttaccgtagcacagttacttttcttagagtcagaagatcctggaaaagatatccagttatatatcaattccccgggtggaatggtaacagcaggacttgcaatttatgatacaatgcagtacatcaaatgtgatgtatccacgatctgtatcggacttgcagcaagtatgggagcatttttactttccggcggtaccaaaggaaagagacttgcgcttccgaacgcagagatcatgatccatcagccgtccggtggagcaaaaggtcaggcgacagagatccagattgcagcagagaatatcttaaagacgaaaaaacgtttgaatgagatccttgctgcaaataccggaaaaccatatgatgtgatcgcagcagatacagagcgtgattattatatgtctgcggaagaagcaaaggcatatggtctgattgatgatgtcatcacaaatcgatagaatacggagaaacagcaattatggcaggaagaaatgacgataaattccgttgttccttttgcgggaagacgcaggatcaggttcgcaagctgattgcaggaccaaacggtgcatatatctgtgacgagtgcgtggatatctgtgctgaaattatcgatgaagaattagaaaatgatgaggcagcaggtgaagtggcagagccggaagagcagattaatctgttaaagccggaagagttaaaggcatttttggatgattatgtcattggacaggatcaggcaaaaaaagtgctgtctgtggctgtctataaccattataaaagaatcatggccggagatgacctcggtgtagagcttcagaagagcaacattctgatgttaggaccgaccggttccggaaaaacactgttggcacagacattagcgagagtcttaaacgttccatttgcaatcgcagatgcgaccacactgacggaggccggatatgttggagaggatgttgaaaatatccttttaaagatcattcaggcggctgattataacattgaacgtgcacagcgcggaattatctatatcgacgagatcgacaagatctccaaaaaatctgaaaatgtatccatcaccagagatgtatccggtgagggtgtacagcaggcattattaaaaatcttagagggaactgttgcgtctgttccgccacagggtggaagaaagcatccgcagcaggagttgatccagatcgacacgaccaacatcttatttatctgcggcggtgcgtttgacggacttgagaagatcattgagaccagaatggatcagaagacgatcggatttaatgcagatatccgtgacaagagagattacaatatcggtgatgtgttaaaacatgcacttccacaggattttgtaaagttcgggttgatccctgagtttatcggacgtgtgccggtaacggtatctttggatatgcttgacagggacgcattgatccgcattttacaggagccgaaaaatgcgctgaccaaacagtatcagaagctgtttgagttagacggtgtagcgcttgactttgacaaagaagcacttgaggcgattgcagataaagcgttagagcgcaagacaggagcgcgtggacttcgtgcgatcatggaggctgttacattagatctgatgtaccacattccatcggatgaatccattacacagtgccagatcacaaaagagatggtggatgaacagcttgcgatcgaagaacgtgaacttgaaaagatagaggaaaaacaggttggataataaagcgatgaaaatgcctgcggtggcacttcgcggaatggtcatccttccggggatgatcgcacattttgatgtgagccgtgaaaagtcgattcatgcagtagaacagagtatgatggatgaacagaagatcttccttgttgcacagcgtgatgtggagcaggaagagcctggcatcgaagatttatatcatatcggtattattgcagaggtcaggcaggtcataaaattacaaaacaacatcgtcagagttttagtggaaggaacagagcgggcacaattgtccgcttttgtttctcagacggactttttagaggtggaactcacgcggtgtgaagaaattgatgagggattgtcggacgaggcaaaaacggctatggtgcgcagtgtacaggacacatttgaaaaatatgtaactgtcaacccgcgtgtcggaggtgaaatgcgcagacaggtcagggaagaaaagaatctgccgaagatcatggatctgatcgccaacaatcttcctttttattatgaacagaagcaggaaatattagaggcagtttcactgacggagcgctatgaagttttgatggcgcttcttttaaaagaaattgagatcactgcgatcaaaaatgaattccaggcaaaagtaaagaaacgtgtggataagaaccagaaggaatatatcctgcgtgaacagatgaagctgatccgggaagaactcggcgaggataatgcggagtcagatgcggatgcctatttagaacagttgaaaaagttaaaggcagacaaagaagtcaaagaaaagatcagaaaagagatcttacgctttaaaaatatcagtggaagttcttcggagagtgcagtcagtcgcggttatatcgagaccatgttagaactgccgtggaataaggcatccaaagataacaaggatctgaaaaatgcagagcgcattttaaatgaagatcattacggattggaaaaagtaaaagagcgtatgttagagttccttgctgtgcgcaatctgacgaaaaagggcgagagcccgatcgtatgtttagtcggaccgcctggtaccggaaagacgagcattgcccgttccgtggcgcgtgcacttgataaaaagtatgttcgaatcagtttaggcggcgtccgtgacgaggcggagatccgtggacaccggaaaacttatgtcggtgcgatgccgggacgtattgtcaatggtctgcgcagtgccggcgtgaaaaacccactgatgctgcttgatgagatcgataaaatgagcagcgattataagggcgacactgcatctgccatgcttgaggtgctcgacgcagagcagaactgtaagttccgcgaccactatatcgaggttccgattgatctgtcagaggtactgtttattgcgacagcaaactctgttcaggatattccacgtccgctgctcgaccgtatggaactgatcgaggtgagcagttatacggaaaatgagaagttccatattgcaaaagagcatttgctgccgaaagtaaaagagaaaaacggtttaaagccggaacagttaaagatcagtgaccgtgcgctgcaaaagatcatttccggttatacaagggaagcaggtgtgcgtaatttagagcgcaggctgtctgaaattgcaagaaaatctgcaagggaagtatacgaatccgaagtcaaatgcgtaaaagttacaggtcagaatgtagaaaaatatcttggaaaagagaaatatacgtttgatcagaaaaacgagaacgatgaggtcggaatcgtgcgcggtctggcatggacgagcgtcggcggtgatacgttggagatcgaggtcaacgtgatgccgggcaaaggcgaagtacagcttaccgggcaactcggagatgtgatgaaagagtccgcacaggcaggcttaagttatatccgttcggtaggggaagaatatcatattccaaagaaatttttccaggaaaatgacattcatatccatatcccggaaggggcagtgccaaaagacggaccgtccgcaggtatcacgatggcgacggcaatgctttctgcgatcacacagactccggtccgtgcggatgtcgcaatgacaggagagatcacactgcgcggcagagttctcccgatcggtggcttaaaagaaaagatccttgcagcgaagaatgccggaatcaaaacgatctgcattccgaagaaaaacgagaaggatgtggaggagatttctgcggagatcaaaaaaggcttagaacttgtatttgtggaaaaaatgcaggaagtgctggaagtggcatttgtaaaaaggagaaaaacatggtaataaaaaatgtaaacctggaaattgtctgcggtgtgacgagtaaagtgccggataccgcatatgcggaggtggcttttgcaggaaaatcaaacgttggaaaatcatctttgatcaatgcactgatgaaccgcaaagcgttggcacgtacttccgcacagcctggaaaaacgcagaccatcaacttttacaatatcaacgatgccatgtaccttgtcgatcttccgggatacggctatgcaaaggcatccgaggaagtaaaggcaaagtggggaaaaatgatcgaaaattatcttcacacttcaaagcagttaaaggcagtctttcttttgatcgatatccgccacgatccgtctgcaaacgacagaatgatgtatgagtggatggtgtatcagggatttgcaccgatcattattgcgaccaaactcgataagatcaaacgaagccagatccagaaaaatgtcaaagcgatccgcgagggcttaaatgtacagccgggaaccacgatcattccgttttctgcagagacgaagcaggggcgtgacgagatctgggagctgatcgattctttcgtgctgccgcaggaagaaaaatagcctgtttaaaaatatgtcagaatatggtatgctgaaactataaaaatttacaaaaagcagaaaatcttaacaggaagcaaactcttatcagattgcgcctgtatgaggttcatgctaaaataatcactatgacgaagagtcagtatcggaggatagccatgaaaaagaaaaaaatcgtaatagcacttggtcatgaagcacttggtaccacgttaccggagcagaaagaggcaacaaaacgcactgcaaaagcggttgctgactttatccgcgatgattatcaggtagtcattacacacagtaacgggccacaggttggtatgatccatacagcaatgaatgagttctgcagattatatccggagtataccgctacgccaatgtctgtatgttctgcaatgagtcagggatatatcggttacgatttacagaatgctatccgtgccgagctgctgaataagggaatttataagacagtttccacagttctgacacaggttgttgtcgatccatatgatgaggctttttacaaaccaggtaaggtgatcggacgtgtgatgacagaagaagaagctgaggcagaggagaaaaaaggaaatcatgtcacagcagtagaaggaggattccgccgtatcgttgcagcaccgaagccaatggatatcgttgaaatcgatgcgatccgtgcattatcggatgcagatcaggttgttgttgcctgcggaggtggcggtattccggtacttgcacaggacaataatttaaaaggtgcgagtgcagtcattgaaaaagaccttgcagcaggaaaattagcagaacttttagatgctgacatgttagtcattttaacaagtgtggacaatgtatgtctgaattacggcacagagaatgagaaacctctttcgaccatgactgttgcagaagcaaaacagtatatggaagaaggtcagttcggagaggatgacatgctgccaaagattcaggcggccattgattttattggagattccgcaatccgttccgtacttattacaaagctgaacaaagacggcacctatgtgagcggtggaccgggtacgatgatcacgaaataaactgccatttttatggtaataataagactgaatcgattgccgaaaataaatttttttacgaggaaaaaagatgtttagaaaaacaaaaattgtttgtactttaggaccttcaacagataaggaaggtgtattaaaacgcctgatcgaagagggaatgaacgttgcccgttttaatttttcccatggtgaccatgaggagcagttaggacgccttcagatgttacagaaacttcgtaaggaattaaagcgtccagtcgcagcactgcttgacacaaaaggaccggagatccgcctgagagattttacggacggaaaagtcgaacttaaggatggacagacttttaccctgacaaccgatgagattatgggagatgcaaaacgtgtttccattacttataaaaacctgccggaggatgtaaaaccgggagatcgcattctgatcgatgatggtctgatcggaatggaagtaaaagaaatcaaggtgacatctggcgcaaaggcagataaagatggcaataagccaaaagatatcatctgccaggtgttaaatggcggtgtgatttccaacagaaaaggcgtgaacgttccgaatgtagaattgtccatgccatatatcagcgaaaaagattatggtgatatcgtatttgcggtagagcatgattatgattttattgctgcatcttttgtccgtaccgcagatgatgtgcttgcaatccgcaagatccttgcagaaaaaggcggcgaggatatcaatatcattgcaaaaattgaaaatatgcagggtgtacagaatattgacgatattatccgtgtttccgatggaatcatggtagcgcgtggtgatatgggtgttgagatcccgttagaggatgtaccggtgatccagaagatgatcattaaaaaagtatacgatgcaggcaagaaggtgatcacagcgactcagatgcttgattccatgatgaaacatccgcgtccgaccagagcagaggcaactgacgttgcaaatgcaatctacgacggaaccagtgcgatcatgctctccggagagacagctgcaggtatgtatccgatcgaggctttaaagaccatggtgcgtattgcagtccgtacggaacaggatatcaattacttacagcgttttaaaatgcgaaaaaccatgagcaacccggatgtgaccaatgcaatctcccatgcgacatgtacaatggcgggagatttgaatgcggcagcaatcatcacggtaacaaaatcaggacgtaccgcccgcatggtttccaaatatcgtccaaactgtccgattatcggaggatgtctgacagaaaagatttaccgtcagcttgcattatcctggggtgtgatcccgcttatgatcgaggaaaagacacaggcagaagaactgtttgactatgcagtcgatgcagcagaagcagcaggaatcatttcaaagggcgatgttgttgtcttaaccgcaggagttcctcttggcgtatccggaacgaccaacctgatcaaggtgcaggtggcaggacatatcttagtggagggacaaggaatcggaacacagaagatttctgcaaatctctgcgtttgtcacaatgaagaagatcttaaaaactttaaagtcggggacatcattgttgcaaaagataccagcaatgccatgatgacacagatgcgtgaggcatccggactgatcgtggaagcatccggcgaaaactgccatgcggcgattgcaggattaagccttgatattcctgtcctgatcggtgctaaacatgcgcttgatgtcttaaaatccagtgcatatgtagaattggattgtgagaacggacttgtgacagcaaattaatttgcaacaaattttgttaactggaaatagaagattaaagtgaaagagaaaaggatatgaaaggctctagagagggtctgcatatccttttttccatattccggtccagtatagcagatacaggattatggcagaggttccattactgattacaacggaataccagacggatgccactcccatatgaaatacatttgcgcatatccaaagagacaacagacggaatagccatatccgggaagcatctacgagcattgtgatcagtgtatgcccacatccctggaacaatccctgtgatacattataaaaagcgtttgtaaagcaccagaatgcaataatggataaatagtctgcagccagagggatgactttggcatctgttgaaaagaatgataccatagtctgggaaacagggcgtcttgaaaaaatgaatcccagaataagtaaaaataaggtgcacatttttaatgaataatggaaggttttcttcgcccgctctgtgtttccggctcccatattttgtccaactatagtagaaacggcggagccgacaccactggctggcattgtgataagactgttgattttgttgccaataccataggcgctggttgcaatataaccataaacatttacatttctggtcatgatcagcgtacctagctgcatggtgctgccgccaatcgcagttggcagaccaattttgataatggcgcgtatcattttctggtcaaagacaaaattttttaaagaaatccgtatgagctgatctgattttgtaagaaggatcagtccaatgagagcgcaggggatttttgctataagcgtggcaaatgctgcgcctccgattccaaagtggaacacaatgaggaaaagaggatctaatatcagattgatcatgatgccaagcagattgagaagcatgggttttacagtgtccccctgcgcctgtttcacggctgtgaataaattgatcatgaacagaaatggcatatcaaggaccacaattcttaaataagtaagaccgtactcatagaccactcccctggcaccgagccaggtgactaatgccggggatatcagccagcacagtaatgcacagatgagggagaagccaagggacgtaatacagatatgatttgccattttgtttgcctgttcatcttttctggcaccaaggtattgcgatataagaattgcacctgcggttgttatgccgctgccaaaactgttaaggatattttgaaatggtgatacgagcgttatggcagactggttttctgttccgatccgtccaagccagaatgtgtccgtaagattatacatcgactggataaaactattgatcatgaccggaacggcgagcataaggattgcctgggacaggtttccatttaaaatcatatttcgtttattttcagatatttgttttggcataggagctccttgtggatttataaaatatgttgacagtttatattcatatggttcataatatgacaaaaaaacagtatattccttgaaaaaaatgatgaaaacacataaaagtacagaaaaatggagaattatatgtttcaggatatgtcaaaagattttgatattaagaagatcagaagaagtaatacaatatctgaaagtaactgcgagccacatgtacatccatttcatgaaattttttatctttccagtggggagtgcaccagctttattgatcacaatatctataagtttggaaaaggtgatcttgtaatcgttccgggtggctgtctgcataagacaatatataccgggaaaggaattcatgaaaggattgttatcagtttccggcaggagattacggattggatcaaagaacagatcggagcggaatatcttaagaactgtatggttccgggggtaatcaatataccggaaaaacgcagaaactatgtggattccctgctggataagttaatgtttgaaaatgatacgccggacatattatcaacggcatttataaaagcaggacttgttgaacttttgctgtttatcataagatgcacggagtatgaggacaatgttataaaagagattgatgttgataaccgaaaaatccaggaagttgcaacatatatttttgaacattatacagaaaatattttgctggaagatgtggcggataaatttgacatgagtaagtcatttttgtctaagagatttaagacagcgacggggttcgggtttaaagaatatattattaatctccggatacagaatgcatgcaggctgctgctggaaacgaataaatctatcacagatattgcttttgaatgtggatttaatgacagtaactattttggggattcatttcgaaagataaaaggtatatcaccacgtaaatacagaaaaaatgaaacattttagtttgggatgcaaaagaagccttcattaaaagaaggcttcttttgtcaggtaaagacaggcagggaggttagcccatcgttacttctacatttacatctttcttctcagccgagaatggaatcgtagttccctctaccggctgtccatccacgatcatggaaaccacacctttttctacatgatttggattctttacggtgatatggtagctgacaccgcggaaatcacgttttgcggtaaatccatctaatttggatggaatacaaggatcaacagtcagaccatcataatccgggcggataccaaggataaactgggaaacatcaaggaaggtccatgcggcggttcctgtcagccagctattctttgcctcgccgaagttcggtgcatcttttccggcgatcatctgtgagtatacatacggttctgtgcggtggatctcactgatgtcttcaatatatgcaggacaggttctggtatatacctgccatgcgcggttgcctctgccgactacggtctctgcgatggagatccatggattattgtggcagaagataccggcgttctctttatatcctggtggataagaggaaatctcaccaagttctacatggtatctgtgataaggcggctgtaacagcacaataccatatttggtgtctaagtatttttcaacggattccattgcttttaagcagtaaccttcttctaagccgatctctgccataacgcagaatccctgcggctcgataaagatcttgccgtcctcacattcttttgaaccgatcttatttttgtaatggtcataagcacgcagataccattcgccatcccagccggcatccataaccgttttctccatctctgcgattgctttctctgcaatttctgcttcctctgtcataccctgatgacggcagatcgctgcataatcttttccatagcgtacaaacatacctgcgataaatacggattctgcattcggaccttcagaaggaccaaatgtctggaaagattcacccggctcagtcgagaagcagtttaagttgagacagtcgttccagtcggcacgtccgatcagcggtaaattgtgcggtcccagatgttccattgtataatggaaggaacggcgcaaatgctccatgaaagtggttgctttggaagcatcgctgtcatatggtgtcgtctcgtcgagaattgagtaatcgccggtctctttgatataagctgcagttccggcgatcagccataacggatcatcattaaagccgcttccgatgtcagagttcccttttttggtgagcggctgatactgatgataagcacttccgtcctcgaactgggtagctgcgatatctaagatacgctctctcgcacggtcagggatcagatgtacgaaaccgagcagatcctgacaggaatcacggaatcccatgccacggccgataccggactcaaagtaagatgcggaacggctcatgttaaaggtaaccatacactgatactggtgccagatgtttaccatacggtctaacttctcctcactggaagaaatggtaaaatgggacagcagttcgttccagtaatcttttaatttgacgagtgctgcgtctgctttttctgcggtatcaaaacgggagagaagttcatcggcacgtttgcggttgatgactccatcctcagcacgtccaacccatttttcctctaccggattctcaacataaccaagtacgaaaacgtaggtctttgtctcgcccggagcaagagatacttcaaggtggtgggaaccgatcggtgcccagccgcttgcaacagaattctttgaagttccgtttacaacaacttccggagcagagttttcaccgtaagcgcctaagaacgagtcacggtctgtatcaaaaccggcgatcggagcgttgacagcgtaaacagcgtaatgatttctgcgctctctgtattcggtcttatgataaagagcagaaccgtggatctcaacctcaccggtggagaagttacgctggaagttggtcatatcgtccattgcgttccacaggcagaactctacatatgagaaaacagaaaaattgcgggtttcattgctctcattggtaagggagagttttccaacttcacatgtctcaccgaccggaacaaaagaggtaagctctgcggtcagtttatttttggttcctttaaatacggaataacccataccgtgacggcagctgtaagcatccagttctgttttggaaggcatccagcccggattccagatcgtgtcaccatctttaacatagtagtaatgtccattggaatcgagcggtacattattataacggtatctggtcaggcggagtaactttgcatctttgtagaaactgtaaccgccgcaggtgtttgagatcagggaaaagaagttctcggaaccaaggtagttgatccatggcagtggtgtttttggagatgtgatgacatattctttgttggtgtcatcgaaataaccgaatttcataataaaatcctccatatacataaatattgataagtaacgatttcgaaaacgattaagttttcatcctttaataaaaagtatatattcagaaagaataaaaatcaatacaaaacattgaaaaacaggcaaatatagcagattaaacaaaaaaaatatacttttatggatgaaagcgacaatagctattttctgatgaataattaaagtattttacgaaaacgtataagaattagatacaaagtactgagattacagataattggtctaatatttaatgtaaaaatgcacaaaaactactgcaaaaaagtgtaaaaagcgacgaattgccaaaaaccagttgcaatttgcttatggatggcatatagtaaaagtacgaaaacgattaagcaatatttcagaaacaggatttcgttttcgaagagaagctggaggtttccatggtatcattaaaaacgattgcagagaaatgtggagtatctactgccaccgtaagcaaggctttaaatgaccagagagatatcagcgaagagacaaagagccgtgtcagaaagacagcagaagcacttgggtattttccaaatgcggcggcgagagctctaaagacaaaccgttcctataatataggagttctctttgaagaagaggcgggaagcggtttgacacatgagtatttttccggagtgctgaatggattaaaagttcagtcggagaaacagggatatgacattacatttatcaatacctgttttgaaaatcgcaagatgtcctattatgaacattgcagataccggaattttgaaggagttgcaatcgtctgtgccgatttcaatgacccggatgtcttagaactgatgaatagtgacctgccggtcgttacgattgattatgtacatcataactgtacggcagtcagttccaacaatattcagggtattgaagatcttgtaaaatatatatacgggcagggacatcggaaaattgcatatattcatgggcagcaggcttcttacgttacaaaagaccggctgtcaagtttctaccggacggtggatgaacttggtctgaagattccggatgaatacatccggacagcagattacttagagaccagggaggcagcaaaacagacaaaagagctgctcaatttagaagatccgccaacctgtatcatttatccggatgacacctctttaataggaggaagaaatgttatcatagagatgggacttcggattccgagggatatttcgattgcaggatatgacggaacaaggatgtcacagttattacatccacagcttacgacaatcagacaggacacagagctgatcgggagcgaggcagccaagcggctgattggctccattgagaaaccgagaacaactctcgtagagagagtcgttatagaagggatcttagttgcaggtaaatccgttggacgcatttaaatgtagttgcagctacatgcagatgacgcttttacagaagtttatacaaaagagcagcaaaagattctgaactatctgctttacaagcagcaaaacaacaaaaacaatggtcaaaagaccacatattaaggaggagggttttctatgaagaagaaaatcgttagcacattattatgtacagcaatgcttgtaaccatgatggcaggatgcggcggtaataacgcagcaaacaccagcacaaacagtggaaacagcagctcggcagatacgggcagcagtgacgccgcagccacagatgaggcagctcaggcgaccgaagctgcagcttcagatgcgagtgcttccgatgaaggaaaagtacttaacatctactgctggaacgaagagttcaagagccgtgttacagatcattatcctggatatacagaggtggatgcaaccacaggtacgatcggtgatgtaactgtaaaatggaacattacaccaaacgatgacaatgcatatcagaacaacctggacgcaaccttattaaaacaggccgatgcagcagcagatgacaagattgatatctttttagtagaagctgattatgcattaaaatatgtagataccgactacacaatggcagtatcagatcttggaattactgattcagatctttccaaacagtatcagtacaccaaagatgttgttaccgattccaacggtgtattaaaaggtgtttcatggcagggctgtcctggcgtattattctataacagagatgcagcaaaagcagtattaggatctgatgatccttcagaagttcagaactatgtaaaagactgggatacattcaatgatacagcaaagaagatgaaagatgcaggctacaccatcacatcttccgcaaacgatacttaccgtgtatattccaacaacgttacttccaaatgggttgttgatggcaagatcaatattgatgacaacattatgaaatgggttgatgattccaaagaacttgtagatgcaggcgagacaggaacatacgaactgtggagtgatgactggaagaaaggtttctatccggaaggaaatgtattctgctactttggacctgcatggttagtaaacttctcaatggcagcagataccgaaggcagtatcggttacaacggtggctggggagcaaccgaaggaccgcagggcttcttctggggtggtacatggatctgtgcagcaaacggaactgataaccagagccttgtaaaagatatcatgcttcagatgacaaccaatgatgatgttatgaaagatatcatcgagaaagatgacgatttcgtaaataaccaggatgtaatcgctgagatggctgacagctcttattcaagcaagatcttaggcggacagaatccacttggtatttacagcgcaggtgtttccaaacttgatttaagcaacctttctgcatacgatcagggatgtaacgaagagttccagaacgcaatgaagaactacttcgagggaactgctacaaaagaagaggcattagatctgttctacaaagcagttgtagagaaatatccggagttaacatactaagcagacgaatggtataaaaaatgatttgatgccgcgcctgccggaccgtaagggaggcgggcgcggctcattttatatccaaatttgtgtaaaaactgtaagcgcagagctgacagcagacttacacagggtaaaggtgagggatgctgtgagctctgtgggcgaaaattatgcactctggaaaaggaggtcaggttgttatgaaaaaaagcagtggaaaggtagtaagatacaataaatggggatatatctttttgattccttttattgtagtatatgttatttttcagctgattccgttgatcagcactatttacaacagtttctttgaaaactatatgtcaggactgacgcaggtcggaccgaatttcgtcggacttgcaaactataaaaagcttttctccgatggagatatctggatttataccaaaaacaccatgttattatggatcatgtgtttcataccacagatcattttgtcactggtacttggagcatggttctctgatgtacgtctcagattaaaaggaacccgtttctttaaaacagtcgtatatctgccaaacctgatcatggcatctgcattttccatgttattctttacattgttctccgatggaggacccatcaactcgatgctgatgcagatcggatttattgatacaccgtacaaatttttatccaatgcgggcagtgcaagagggctgatcgcgttaatgaactgtctgatgtggtttggtaatacaacgatccttttaatggcaggtatgatgggtattgatacctctttgtttgaggcagcggaagttgatggtgcaacttcttcccaggtattctggcagatcacattgccactgttacgtccgattcttgtatatgtggttattacatctctgatcggtggtttacagttattcgatgtaccgcagatcttaaccaatggaaccggtgacccgatgcgttctaccatgacgctgatcatgttcttaaataaacatctctacagcaagaactatggtatggctggtgcattgtcagttgttctgtttatcattacaggtatcttaagcctggtagtatttaagataaccggcaatgataagaggaaggggtgaagatcatgaatgaaaatcgtaatctgaaaaaaggtgtaggaattcatgcaagaagactgatcgcatatatcgtactgatcattgtttccatattgtgtctgttctggttttatgtactgtttatcaatgcaaccagatcaaacggtgagttgcagtcaggttttacgctggttccgagcagccatctgtgggaaaactggaagaatttgagaaatggaacgcttccggtatggaacggtatgttcaacagcctgatcgtttcttcgctcagtgcagtactcagcgtatatttttcaacgatgacagcttatgcgatccatgcatatgatttcaaactgaaaaaatacatttatccgtttattttgatgatcatgatgattccgacacaggtaactgcacttggatttatcaaacttgtttccaacatgaaattagaggattcctttatacctctgatcgtgccgacgattgcggctccggttacatttttctatatgaaacagtatatggagagtacactgccgttgtcactgatcgaggcagcacgtatcgatggttccggtgaattccgtaccttcaatgcaattgtaatgccactgatgaaaccggcaattgctgtgcagatgatcttcacattcgtaagcagctggaacaactacttcacaccggcattgatcttacatgatgacaagaaaaaaacactgcctatcttaatcgcacagctgcgtgcggcagactggctcaagtttgacatggggcaggtatatgtgatgatcgcattttccatcttcccggttatcattgtatatctgatcttatccaaacacatcgtacagggtgttgcacttggaagcgtaaagggttaataaacggattgctgtactacataaaaatgagactgccatatgggtggtctcattttttaactcttatttttgatgaaaatctttgacaatgtcactggtaaataagccggttgtgtgctatactattatctatgattagtagaaataaaggatcggatgtgttggggtacatgggtgcagacaagaacggacaggctggatctttgtaaaatacacatagaaatggagaggaatatgacagagacaggattatggatttttctgatttgtttacttgtagtagtcatcatagcgactgtggttgcagtagtgtcagcagtatcaggtgctacggcagcgatcgtggatgatgaggaatcagaggaagagtaggaatacagcaggtataagagaaaagcctcttgtcagttttgtataggtgtatagctgacaggggcttttttgtgcacaggattctgccttaatcagcaatctaaaaaaatataaactggtacgaaagtcttgcaatccattttgaaacaggtaaactaaatatattgtggcaaaatatttgctgccaggtgtttattacaaatgtcttgcgtattcaggtggagggacaaaagagagtgttgtcaaaattaagtgtgaagaaaccgtatactgtgatcgtaggcgtgatcttagtcattgtgttaggagccgtatccctaaccaaaatgaccacagatctactgccggatatgagtctgccatatgccttagtcattacgacggatatgggggcaagcccggagaaagtggaatccgatgtgacagcacctgtcgaggcatccatggcgacgacttcgagcatcaaaaatgtgagttctgcctcctacgataattattcgatggtgatcttagagtatgagcagaatgccaatatggattcggtcattatcgagatccagcagaaattagaccagttagagggcagttttccggatggtgccgggaagccgatgatcatgcagatcgacccggatatgatgcctgtaatggtggcatctgccgatgtggaaggcatgacgcagtcagagatttcggattatgtggaaaatgaactttcgccggtgcttgagagtatcgacggtgtggcatctgtttctacaaccggaactgtggaagagaacattcatgtcacattagatcaggataaaatcgatgcactgaatcagaagatccagagtaagatcgaggaacagtttactgaaccgcaggaacagctcgatcaggctgccgagcaggtggagagtggacgcaggcagatggaaagcggaaaagatcagcttgcaaaccagcttggacaggcagaaaatgaagtgatcaatggtaagtcgcaggcgtttgtggcagaatcagatctgagtcagaattatacagtattgaaagcgaccgatgagctgataaagcgggcaatcccggaactccagagtatttatgaacagggaatgggattaaaagcagacattgaacaggcacaaaaagaagcccagatgaacagtgacgatggaagcagacgtatagaagaacttttagaggaggcgaagatttccggagatcaggaacagatcaatcagatccttgcgatgaccggggaaaatcaggagagcattgcggaagcaggaaaacgtctggaattattacaggaagaactgttagaactgaatacatccttaaatcagcagtgggcagatcagttagcagcgttaaatgtgagtcttagttcgatcgatgatattccgcaggtgattacgcagctgtcacaaaaacaggttgagatccaaacagcaatggcagctctgcagactgcacaggaacaggttacagatggaaaaactaccttagatgatgcgtatgtaacgttaaaccggatggagatcgacgggatcttagagatgagtgaagcgtctgcacagcttgcggtcggggaagcccggttagagcagggacaggaaaaattagaagagtcaaaacagagtgcacttgagtctgcggatctgaatcagatcctgtcggtggaaacattaggccaaattctgacagcacagaatttttccatgccggcaggttatgtcaatgaaaataagaaacagtatttagtgcgtgtcggcgacgaggtttcatccgtggaagaacttgaaaatcttgtgctggtggatgtcggaatggatggaatcgcgccgatccgtttatcagatgttgcagaaacagaagtggtggacgatacgggagattcctattccaaagtaaatggaaatccggcgatcatgctttccattgaaaagcagaccggatactccaccggagatgtgacaaagcggatcaagacacgatttgagtcgttggaaaaagaaaatgacaaacttcacatgacgatattgatgaatcagggcgtctatattgataccattgtgcagtctgtcatggaaaatatgatcttgggtgcgatccttgccgtgctcattttgatcttatttttaaaggatatcaaaccgacactggtgatcgcgtgttctatcccgctcagtgtggtttttgcgatcgttttgatgtattttaccggaatatcgttaaatatcatttcactgtccggtttggcgctcggtgtcggcatgctcgtggataactcgatcgtcgtgatcgaaaatatttaccgtctcaggaatcagggattttcgatccggaaggcagcagtcgagggagcaggacaggtggcaggtgcgatctttgcatccacactcacgacggtctgcgtgtttgcaccgattatttttacggagggtatcacaaggcagctgtttgtggatattgcactcacgatcgcctatacgttagctgcaagtctgattgtggcgctgacgtttgtaccgatgatggcatccggtgcgctgaagaataccagagaaatcaaacatccgtggtttgaccgcattttagatggatatgaaaaagttctgcgtgtggcactgcggtttaaaccgatcgtactgatctgtgtggtagtttttctggtggcaagtgtgacgctttccgtttccaaaggatttacctttatggacatgaatatggagacagagcagctcacggtcacggtttcagcgaaagaggatgaaaagctgacatttgaggaactgacggagcgcgcggatgaggttgtggataagatctctggcatctccggtgtggattcgatcggagccatggcaggcggcggtggaatcatgtcgatgggcagtacggacagtgtgaccatgtacgtgctcatcgatgattccggggcgactggcagtgagatcactgcctcgatacaggcgcttacagcggatcttgactgcgacgtgaatacggacagctctgcgtcggatatgagttcctttttcggaagcggtatttccgtgcgggtcagcggaaaagatttagataagctgcagaaactcgcagggcagatcgcagaagtcgtggaaaagacggagggcactgtagatgtggacgatggtcttggagatacgacaccgtctttcacggtaaaagtggacaaagaaaaagctgcaaaatatggcatgacaacagcgcaggtgtatcagcttgtctataaacagcttgcatcgaatacgtcatccacaacgatctcgacggatttaaaagactataaagtatatgtgcagagtggggaacaggcggatgtcacgccaggggatatccgtaagctgacatttccttatacagaccgtatcagcggagagacaacagatattcccctgaaagatatcgcagagtttgaggaaggtgagtccttaaatgtgataaacagaagctcgcagacgcgctatatcagcgtgacagccggtgtggatgaagatcacaatgtgacgctggtaagtaaccagatccagaaaggattagataagatcaagctgccggatggatatgagatctccatgaccggggaggatgagacgatccgggatgcgatgaaccaattgtatctgatgctgatcttagcggtggtatttatttatcttatcatggttgcacagttccagtcatttttgtcgccttttattattatgttcacgattccgcttgcatttacgggaggtttctttgctctgtttgtgacagacaatgaagtcggcgtggtatccatgatcggatttgtcatgttagcgggtgtcatcgtcaataacggaatcgtgttagtcgattatatcaatcagctgagaagagagggcatggataaaaaggaggcgattgtcacagccggaagaacgagactgctcccgatcttaatgacggcactgaccacgatccttgcaatgtccacgatggcgatgggacttggaagcggttcggagatgatgcagccgatggcgatcgtgacagagggcggtatgctatatggaacgctgctgacactgatcgtggtgccatgtatctatgatctgtttacgaggaataagagtatggtggaggaagagatctaaaaaaacagttgacaaaccccgcgtcccctcgtatgataaaaatagcaaaaacaaaggttgtgagaaagaggagtacacataaactctttgcagagagggaagttcaccggctgaaagacatcccagagaaagatatgtggaaggtagcttttgaaccggaatgctgagaaagcatagctgtatgacaggatataagaacaggcattgcagatatgcacaggtattcacgactcatccacgttacaggatgaccggtcagatatggaactggctggacatgagcaccaacaaaggtggtaccgcgatcatattcgccctttgtattccgtatggaatacgaagggctttttttaattcataggaaattatgtcctgtgaatcaaaaccgcctatctatcagaactaaaaaaggagaacagattatgtgtcagaattgcagtaaagaattagcaaagacctacgatccaaaaagcattgaagaccgtttatacaaaaaatgggaagacaacggctatttccacgccgaagttgaccgcagcaaaaagccgtttaccatcgtgatgccgccgccaaacatcacaggacagcttcacatgggacatgctctcgacaacaccatgcaggatattttaacacgttataagagaatgcagggttacaacgcattatggcagccgggtacagaccacgcttccatcgcaacagaagtgaaagtaatcgagaacctgaaaaaacagggcatcgacaagcgtgatcttggaagagaaggattcttagaaaaatgctgggagtggcgtgacgagtacggcagccgcatcatcaaccagttaaagaaaatgggatcttccgcagactgggagagagagcgttttacgatggacaagggctgctctgaggcagtacttgaggtatttgtaaaattatatgaaaaagggctgatctacaaaggttcccgtatcgtcaactggtgtccggtatgtaagacttccatctcagatgccgaggtagagcacgaagagcaggacggattcttctggcacatcaactatccggttgtcggcgaagagggaagatttgttgagatcgcaacgacaagaccggagacattgtttggtgataccgcagttgcagtgaacccggacgacgaccgctacaaagacatcgtcggaaagatgttaaaacttccgatgacagaccgcgagatcccggtgatcgcagacgcttatgttgacaaagagttcggaaccggatgtgtaaagatcacaccggcacatgacccgaacgactttgaggttggaaaacgtcacaacttagaggagatcaccgtcatcaacgacgatgcaacaatgaaccattatgccggaaaatatgagggcatggaccgctacgagtgcagaaaagcactggtggaggatcttgaaaaacagggactgcttgtaaaagtagagccgcattcccacaacgtaggaacccatgaccgctgcggcacaaccgttgagccgatggtaaaacagcagtggtttgtaaagatggatgaactgatcaaaccggctgtggaagcagtgaaaaacggagacatccagttacttccaaaacgtatggagaaaacatactttaactggactgacaatatccgtgactggtgtatttccagacagctctggtggggacaccgcatcccggcttattactgcccggactgcggtgagatggtggtagcaaaggctgcaccggagaaatgtccgaaatgcggatgtgatcacatggagcaggatccggatactttagatacctggttctcatccgcactctggccgttctccacattaggctggccggataagacagaagatctggattacttctatccgaccgatgtacttgtaaccggatacgatatcattttcttctgggtcatccgtatgattttctccggctatgagcagatgggcaaagcaccgttccataccgtattgttccacggactggttcgtgattcccagggacgcaagatgagtaaatctttaggaaacggtattgatccgctcgaagtaatcgataaatacggcgcagatgcactccgcctgacactgatcaccggaaatgcaccgggaaatgatatgcgtttctactgggagcgtgttgaggcatccagaaattttgccaacaaagtatggaatgcatcccgtttcatcatgatgaaccttgagggaagcgagatcaaggagccgtcactgggtgagttaaaaccggcagataagtggatcttatccaaggtaaacacacttgcaaaagacgtgacagaaaatatggataagtacgagatgggaatcgccgtacagaaagtttatgatttcatctgggatgaattctgtgactggtacattgagatcactaagactcgtacttataataaagaaaatgatccggcatctgcaaacgcagcattctggacattaaagaccgtactgacagaggcattaaaactgcttcatccgttcatgccgtttatcacagaagagattttctgcacactgcatccggaagaagacacgatcatgcttgcaaaatggccggagtaccgtgctgactggaatttcccggcagaggaagaaatgttagagcactgcaaggatctggtaaaaggtgtccgtaatgtgcgcacagagatggatgttccgccatcaagaaaagcgaaaatctttattgttgctgaagatgccgctttgcgtgattcctttgaactgaccaaagaggcttatgcaaaccttgccggagcaagtgaggtcatggtgcagcaggataagacaggcatcggggaggatgcagtatctgttgtgatccctggcgctacactgtatctgccattagaagatctggttgatttcgagaaggaaaaagagcgtctgttaaaagagcaggcacgtttagagaaagagcttgcacgttctaagggaatgctttcgaatgaaaaatttttaagcaaagcaccggaagcaaaagtgcaggaagagaaggacaaacttgccggatacgaacagatgatggagcaggtcaaagaacgtttgacacagatgtcaaaataattgcaagataatgagcgcaagaacggcgaattgtatcatgtgctgattttgcacatgatataataagactgccgagcgaagctcgtgtagatcatgatcatgaagcattgcttcatgatataataagaaggagctatgcacgatgggtatcatctttactggtcagccggtaaagtggtgcctgccttgtatagctctttttggtaaaatagcaccaaaaaggatgcgttgtgttaaagaatttacttgaaaaagcataaaaatactagtattatataggataaggaatattctacgttactatgtatacatacatcagaaagaattggggagcacgcctatggtaacagaagaaaaaccaatcgtacggatgacggcagatagcatggaagcgtatgttatgcttataacaccagacgatgggggagaatatacaattgaatcattgcagaaagcattggatgacagaggtgtcaagtacggaatagatgaagcagcgttgacggagctgattgatgaaaaaaaatatggtgtggagacgttagttgcgcagggaacagagccggtagacggaaaagacggttattatgattacaattttaactgcaactttgataaaaaaccgttgatgcggccggatggaaccgtggattactggtctgtaaagtcgatagagtctgtggtgcaggatcaggtgatcgcggagtaccatccttgtgtggagggaatggacggcaagacagtcactggaaagccgatacctgcaaagcggggaagagaacagcttccactgaaaggaaaaggatttgaacgcaaggatgataatacctatgttgcgctgatgagtggtaagatcgagacacagaatgacagggttgtgatccttccggtacatgaattgtccggcaatgcagatctttccagtggcaacattgattttcatggtgatgttgtgatccacggaagcgtggaaagcggcgttatagtaaaagcaagcggtacgatcacagtggatggaatcgtcgaggcatgtactttagaggcagggaaagatattattttaagaagtggaatgctcggtggaaataaggcatcagtaaagacaaaaggcagtattaccgcaaagttttttgaatttacccgtattgaatgtgcaggcgatatccgtgcagatgtgctgatggattgtcaggtacagtgctttggaaagatcatcatgaatggaaaacgcggaagcatcatcggtggccttacacatggagtgtgtggaatcgaggttacgacattaggaaatgatgccgagaaaaagaccgttattatggctggtgcaagtccggaaggatatgcaaaactcagacagttggaaaagacgattcaggagttgagtcagggattggcacagattgaagaggggctgcgcaagtttgaagagctggaaaaagcgcgtggagtcagctacaaagacgatccgaggcgagtgacattgctccgtatcaagatccgtgatactgcgacattagcacacagcaaagaagaggcaaagcagctgcgcaatctgatcgagagtgcgagcggtgcatgtgttaccgttttgcgggggacttatccgggagctgtgatccagatcgaggataccaagctgcttgtacagaattatgtaaaagcagctgagttttacaagctgcaggataagatcaagacgagagaatgctcataaaactgctgtcgaatatggcagaagttttacgaaaaacttaatataaatttacttgattattgtcaccactatattataatatagtggtgattctttttgcccttaattatgtggtggagagaagaatcttaaaatagatgtttgccataaacaaatggcagaaaaggacaggtcgattatgattaattttgaagaagaattaaagaattttaaaccgagcttagaggtagaagaggcagaacaggcaatatataatcatgaattaacagatatgacagatgttttaaaagagatgatgcaggagttaaaacataatatgtaagacatcttttggaaaagtcgaatgtaaattcatgaagtgagggaaagaatgaagtgctataattgtggagcaaagcttggaagggaaaatatctgccctgaatgcggcgtaaatgtaaaaatatataaaaaaattgtcatggcatccaatgaatattacaatgatgcactggcaaaggcgagtgtccgtgatctttcaggagcaatagaaagcttgaaaacaagcctgaaattcaataaattaaatatagatgcaagaaatctgctgggactcatctactttgagatgggcgaagtggtggaggcattgacagagtgggtcatcagtaagaactatcagcctgctgagaatgccgcaagccgttatctggatgaaatacagaataacagatcaagacttgagacaatcaatcagaccattaaaaaatacaatcaggcgttattgtactgcagacaggacagccgtgatcttgcgattatccagttgaaaaaggtactgtcactgaacccgaaattagtcagtggacatcagcttttagcattgctctatattcaggagggcaaatatgatcttgccaagaagtctttgcgcaacgccggaaagattgatgcaaataacacgatcacacttcgttatttaaaagaagtgaatgcaggattaaaggagaatacgccgggtaagaaacagaaggaggaacagatttcctaccagagcggcaatgagacgatcatccagccgaagtatttaaaggacaattccgcaatgagtacgattcttaatatggtcatcggtattgcaatcggtgcggcaattaccggatttctggttgtaccgggtgtgcgccgtcaggtgcagaatgatgccaaagcgcaggtgctcgatgcgaataacactgtttcgtccaagaatcaggagatcagtacactgcagaagcagattgatgatctgacgagccagatcactgaggtcaaggacagcgcagaaggttccgagaataagatcagcacatatgaccagttattatccgcatatgcatcctattcggatggagatattgaggcagcaggcaatgcgcttggcaatgtcaatgaggaatacttaagtgacagcgcaaagagtgtttatgagacgattaatgcgcaggtcaatgctgattatctggagtccttatataatcagggatacagcgattataacagtcagaaatttgaggaatccatcaccagcttgcaaaaagttgtggacatggaggaaacctacaaagatggatatgcactgtactatttagcacaggcttaccgtaagaataatgatcttgaaacggcaaagacttactatcagaagatcgtagaactgtatccgggtacagagcgcgcggcgaatgcacagaattacatcaatattgaagagtaaaaatcattaaaaaaattaaataaagatgatacaaaagacgtctaagtgatattaggcgtctttttttattcatagggtattgaaagcaaaaggtgacttttaaaccaattaaaaaagtaacaggaaaggagcatttatggaagaaaagtatcagttaaaagaaggatgtctgacgatacagatgccaaaagagttagatcatcatgaggcgggcaggcttaagatggaggcagattttctgatcggggcatatcatgtcagacggcttgtgtttgattttcgggaaacagagtttatggacagttccgggatcggtgtgatcattggaagatgcaagagcatggggttttccggcggcgaagtggcagcaaccaatatgaatgagcgcgtaaaaaagatttttatggtgtcaggcctgcaaaagctgatccgggtcgatacggtataaaaatagacacatgtaattggcttggaaatgggccaggcagggaatatccgccaggaaaagatgaaatcagcgaatttacgcgaacagttgaaatagaccagacaagggaatgtccggtaagagaaatgggatatgtgggattttggaagaaaataagaataaaaagaggaaatggagaatcgatatgcaggcagatcagattaatgaaaacgaaatgaaactggaatttgatgcgcggtccgtgaatgaaggatttgccagaatggcggtggctgcgtttgtggcggaattaaacccgacactggatgagatttctgacattaagacagcagtttcagaggcagtaacaaatgcgatcatccacgggtatgacagtccggaggagaaggtggaggtgtcctgtaaactgtgcggaaaccatgcagagatcacagtgaaagatcatggtcacgggattgcggatgtacaaaaagccatggaacctttttttacgacgagaccggaactggagcgttccggcatgggatttgcttttatggaagcatttatggatgaagtcgaggtacattcagcacccggaaaaggaacaactgttacgatgaaaaaaaagatcggtgcagggatgggcgtctgatatggagggttttaaggaactgatgcagcaggcacatggaggagataaaggtgcaagggatacgctgattgcaggaaatctgggactggtacatactatcgcaaaccggtttgaacaccggggacatgagagggaagaattgtttcagattggatgtattggattgatgaaggcggttgataaatttgatctctcgttaaatcttgcattttccacttatgcagttccggtgatcatgggggaaatccgcagatttttaagagatgacggtatggtaaaagtaagccggacattaaaagaaaacgcttataaggcagggagggcaaaggaagaactgtggggggaacttggaagagaaccgggattgcttgagatcgcagagcggacagggctgagcagcggtgagatcattatggcaatggagtcggcaagagatgtggaatccatctatcagccggtctatgagaaagacggggacgagttactgatggtcgatcagttgtgtgaaaaggaagaaaacggaagggatgaaccggaaaaagaggcagtattaaaccggatggtgatcgagcagctcatggaactgctggatgagcgggaacagaatctcatccggtgccgttattttgaaaacaggacacagagtgaaacggcaaaagaactgggaatgacacaggtgcaggtcagcaggcttgaaaaaaagatcctgttgtgtctcagaaaaaatttaggatcgtgtgattcgtgatgtatccggttgattttcccagataaacatgttattttttataaaatgcacaggattgtgtgcagcaaagctgtgtaaagtggaaaacagcatgaaaaaataagaattttgtgaaaaataagacttttgtacaaaagagaggattgacatgaaatacgaaaattacatatttgatttatatggaactctggtggatatccacacagatgaagaaaaaacggaactctgggagaaactggcgcagttttacggctattatggtgcggtttatactgcagaggaactgaaaaacgcgtatgcgtgcctcacggggcagaaagaggatgcattgcggcaggagatgggacctgatgcagccatgaaaaaagacgatgcacatgaagcacatccagagatcgagatcgaggaggtttttcttgcattgtttcagaaaaaaggggtacaggcagacatagaacttgccattcatgctggacagtttttccggatcctttccacagaatatatcagactttatgacggggcaaaggaacttcttgcggcattgcgtgaaacaggaaaaaaagtatatctgctttcgaatgcacagcgtatttttacggcgtatgaattgaaacttctgggactggagccttattttgatgatatctttctgtcatcctcgtgcaaagtgaaaaagccggatacgcgtttctttcatcttttgctggataaacatcacattttgccggaagagagtattatgatcggaaacgatgcggtcagtgatatcaaaggagcaaaagaggtcggactgcatacattctacattcattcaaatatttcaccggacacagagaagaaaccggacgcagatcatgtgctgatgcagatggatctggcaaaagtgcggcagatcctgatttctgattaatgtgacagaaaaaaatgccgatacatttataaagaaatcgattttcacggatgcaataaatggggaatgagtttatgaatttatcgatcaatgcaaacggtttttcaaatgtacagaatacagcggcagggcacaaagcagagcaggcaaataaacagggaaaaagcgcattttttgcgggaagtccggtactgacaacaaaaaaacagatcgaacagcgaaaaaagatggcacagaaaagtgccttaaaactggtgaaagatgcgtgggataacgaccaggctgtggaaaaaacggtcgcatcgcaaagacaacgctatgcggaattagacgcacagcggacggaggcaaagaaggcacttgccggttatgaagaccaggaaaaaacattgaaggaacagtgcaacgtagcagacgattccaaagaacagcaggatttaaacctgttggaaaagagacaggaatacaggcgcggtgtgggtgagaaactgactagggatgagtggaaaaagttaaatgagatcgataagcagccactcacagagtaccagaaacgggcacttgagatccatgcccaggcggtagaagaaaaggttacgatccgcgatacaaccagtggaatgcaggctgccgtcggcaatgtgaagcgtattatgatcgaaaaattaaagacacatggaatggtggatgcgaaaaatgctgccgatgatatcatggatgctgcaaacgatgatgtggtctccatgcttgtctctgatgtgaaagatggcattgatgagaagatggaagaggcaaaagaggatgcaaaggatgtcgcagacgaaaaagaaaagcgtcaggaacgtttagatgccttagaggaaaaacgtgcggtagaaaaagctctgatcgagggcaccaaagaggctgtggatcgtgcaaaggaaaaacagcagagacatgaggcaccggatatgaagttagatgagatgctgacactcacgacagaacataagcagatgaacggtgtggagcagggacttgatgacattaaaagcagcatgaaggttttagaggcagatttaaaaggaatcaaggttgacaaggaggtctagtaccggttatggcaaaatacgaaaaaacagaacgtctcgaaaaagtaccgatggagtatttgtgggagggacttgttttatcagataatctttacaattataatggaagcgtacttttagtgccaagcggagaagttatcacgaaaagcaaacttgataaactgatcaatttcagtgatggcaacaattatattacaacattccgcggatcttatgagtatatcatgaagggaaaagaccgtccggctgaaatacagcagaaaatgttggaaaacaggaccgggtatacagaactgcgcaaaggcatcgaccatgtgcttcagatgagtaaaaatgcgatgtttgtcaatcatgctgaagtggaaggcatgatggagaaagtatatggcagaatggtatccgtggatgccggggagattttccagtgtattaccgtgccaagaccggttgacgaggcattacagagacattccctaaacgttgcacttttaaacgggatcatgggacagtggttaggactcgatgaaaaagatatccggagtctgattttaacaggtgtgcttcatgatatcggaaagacgaagatcccggaagaaatattaaatgcaccgcggaaactgacaccggaagaatttgaggttatgaaaagacatccgctatattcttttgaactgcttggggatgatatcagcgaggatgtacgctatgcagtacgctggcatcatgaaaagctggatggaaaaggttatccggacggcttaaaggcagaatctatttcttattttgcaaggattacaacgatttctgatatttatgatgcgatgctttctgcacgcagttacaaaaaagagaagattccgtttgatgtactgcaatggtttgtaaccgagggcagcaaaggaattgaccagaatcttctcaatatatttatcaaaaatatggtaaaagtatacagacaacagcaggtcatcatgtcagacggcagggaagggtgcgtggaatatatcccattaaacgatatggatcatccggtcgtttctgtcggagaagaagtgagacaggtggatgaagactggtactgcgtacatatggtttaagattctaaaggatcttcgcagagggtaaaatgattgcgctccgttgtaaggagaccctcccgctgcatttttgagagttcggcagagagtgcactgcggtctacattcaggtagtcggcaagctgctgtctgttaaacggaattgtaaaatcaagactgtttgcggcggcagactgcgcagacagataagagagcagccgcccgcggatcgactttggtgtggtgtggaagattctgcgcgaaagcagcagatttttccgtgccgaaataaaaaataaattgtggatcaggcggttgtgatgtgtgcagctgttcgtacaggtggtaagcagccgtcctatatttaaaaataacacttctgtctttgcagccgcagagacaacattgaccatcagaggttcttttgacagactcgcataagtttcggcgaagaaaaagccgggagttatgtcatctagtacactgtgatttccccagacatcatcactttcaatctgaacatttccggagagcaccagtcccatcgaatgcacgcattctccggcatgatagatgatctcaccttttccgtagcttcttgtgactgcaccgaggcaggagagcatttctttgatttcttccggcgattcgcccgaaaacagcattgtctgacttaaaaactgataatccataaaagaaaaccttcttttttcaaaaatttttaaaaatgttgttatgacaacatacttttgaaaaaaattctagtatagtgtacgagtaatgtcaagggcacagatgacaggatgagtagcctgaatctgtgaacagtaacctgtgaacagaacgaaagaaaaagaaaatggaagcggaaaacaggaggaattcatatggtacgcagagtgatccagatagacgaagaaaaatgtaacggttgtggaatttgtgcggaggcatgccacgagggcgcgatcggcatcgtggacggaaaggcaaaactgctccgtgatgattactgtgacggacttggcgactgtctgccaaactgtccggtcggagcgatctcttttatcgagcgtgaggcagcagcttatgatgaggcagccgtacaggaaaataaaaagaaaaaaatgcaggagatgggacaggcaccggttggcggatgcccgggttcaagaatgcgccagcttgaaagaaaacctgcagaagaaaatcagaatgcaggttcaccggtcagttcccaattgcgtcagtggccggtacagatcaaacttgcaccggtcaatgcgccttattttgacggggcaaaacttttaatcgcagcagactgtaccgcatacgcatacggcagtttccaccaggattttatccgtggaaaagtgacactgatcggatgcccgaaattagatgacgtggattacagtgagaagctgacggagatcatcagaaataatgatatcaagagcgtgacggtcgttcgaatggaagtgccttgctgtggcggactggaacatgcagcagtgaccgcattaaagaacagtggaaaattcattccatggaatgttgtaacgatctcaattgacggtaaaattttagattaaaaagaaggatagtagaagggagaatcatatgttttgttttcagtgtgagcagacagcgggatgcagtggatgtacaggggcagccggcgtgtgtggaaagaaaagcgtgacagcggatttacaggatgaactgacaggagcacttgtgggacttgcacatgcctgcatgaataatccaaagacagagcagacagaccgcattataatagaaggtttattcacaacgatcacgaatgtgaattttaatgatgagacactgcgtgagatgatcgcccatgtccgggaagaaaaaggaagagtggtgccgggatgtgcagcctgcatgtcaccgtgcggcaataccagcgattatgatatgaagcggatgtgggaggcagatgaggatatccgttccttaaaatccctgatcttattcggaatccgcggtatggcagcatacgcttatcatgccatggtactcggctatacaaatgaggaagtaaacgactttttctaccgtgcattatttgcagtcggagaagatttcgagatggaagatctgcttccactcgtgcttgagacaggaaaagtaaaccttacctgcatggaaatgttagaccgtgccaacacagaaacttttggaaccccggtaccgacggaagtgcctctgatggtggaaaagggaccgtttattgttattaccggacatgatctttatgatctgaagctcttgttagagcagacaaaagacaagggaatcaacgtttatacacacggtgagatgctgccggcacatgcttacccggaattaaagaaatatccgcatttaaaaggcaactttggtactgcatggcagaatcagcagaaggaatttgatcatattccggcaccggttctttacacaacaaactgcctgatgccggtcaaagaaagttatgcagaccgtgtatttacaacagaagt

SEQ ID NO: 5211 - DNA, 2312 bp, Unknown
  gut microbiota DNA sequence
tcatgaccggattcggtcacggaacggtactcggcgtggcagatcaggtgatcgcagccgtaaaatccggtgatatccgccatttcttcctggtaggaggctgtgatggcgcccgtgtgggaagaaattattatacagagtttgtaaaacagacgccaaaggataccatgatcttaacacttgcatgtggaaaataccgtttcaatgatcttgaccttggaacgatcggtggactgccgagaatccttgatatgggacagtgcaacgatgcctacagtgcgatccgtgtcgcagtggcacttgcggaggcatttgactgtggcgtgaatgagctgccgctttccatggtgctttcctggtacgaacagaaagcagtctgcattttattgacactgctccaccttggtatcaaaaatataaaactgggaccgacactgccggcatttatttcaccaaatatcctgaattatctggtagaaaattatggaatcgcaccgattacgacaccggaagcagatttagcagagatccttggataaatcaataaaatgaatgttttgggttcctttctgtcgccctgaatgagaaaagggggtgtgaaaaatgattttttatttttcatacttcctttttctggttaaatgaaaaaatatactgtatattgtcgaattttgagttataatagataataagtttgtattcaggcttgtcaggaatgagaatattgtttttataaaaaagcacgaaatggggaatggtatggaaagaatctggaatttttttgaaaatatgaatgaatatgtatatgttgcagatgcggatacccatgaactggtttatatgaataaaaagatgagagatacttatgggatacattcaaaagaggaacttgccggcaaaaaatgttatgaattgcttcagaattcaagcctgccctgtacgatctgcaataatgatgaactgcaggaaggacagtttaaggagtggcggtattttaacccgcttttaaataaatactttaaaattaaggatactgttgtggaggacaatggcagacgatatagaatagagattgctctgaatataagttctcaggaacatcagaaaaatgtggtacgccgctacgaaaaactggaaaaaatcgttaatgagggactgcgtcttgcccttggaacatcttctgcggataaatcgctggacatcattctggaatatataggaaaggcattagatggagagagaacatatatttttgagcataatgagaatgggtacgatgacaacacttacgagtgggttgcaaatggaatcaagccggagaaagataatttacagaaccttccaccagaattatgtgccaactggtatcggaattttcaagaagataaaaacattgtaattgaaaatctggagaacatcagagaggaagattcggaacagtataagaatctgaaacgtcaggatatccattcactggtggttgttccactttattgggagaaaaagatcattggattttacggagtggataatccaccggcagaatcattagattatgtttccgatatgcttcatatcatgggatcttttattgtttcctccattcggagaagaaatctgctccgtcagttagaacgcatgagttatcatgaccagctcactcagtttggcaatcgttatgcggtcgactggtttgtggagcatgagtggaatggggaacagatcggtgtagtgtactgcgatatcacagggctgaaaaaggtcaatgatgagcaggggcatgaagccggagatcggttgatcatcagggcatgtgagtgcttagcgggtgtatttaaggggtatggtctgtatcggatcggcggcgatgaacttttagtactctgtcttggaatagaggaaaaagacctgagggaacacgttgagaaactgcgcatggatatgaaagaacatcaggttacgatggcggttggcatgatatggaaagaacgcggccctaaggatatcgatctgcttttaaacgaatcggagcgcctgatgtatgaggataaagaccggtattataaggaacacggactgaaacggcgcagataaatcattgtattgcagaattaagtgttatattttccttcatgctggtctccttctgtttattcccggtaaatctgtgcaaaccggaaatttctgatgaataacatggtgcaggatcgttttcgattattatattttactgtgagattgtgatattagcaatagtgaaatggggcagagaagagttgaaaaggcagacggataagaaacaaagataaaat

SEQ ID NO: 5212 - DNA, 4463 bp, Unknown
  gut microbiota DNA sequence
gagcgaatcatagtctatacttaaggagcagcatggaacagaaaaattcctacgaaaaaatatatgacattgtaaaacagattccacgcggtacggttgcaacctatggacaggtggcagcgcttgcgggcaacaaaaggtgggccagggtggtcggctatgcgctgcatgtaaatccggatccggagggaatcccgtgttaccgggtagtaaaccgtgaggggagagtttcggaggcctttgcatttggtggcgaaaacaggcagatcggacttttggaagcggatggcatagaggtaaaagacggatgtgttgatctctcaaaatatcagtggcgcaaagagatattttaacgaatactttaattcctattgacatggtatgaatagtcggatatacttctaatacgatgataaaagaatcgtttattcataagtttgcggctgcgctgcatccgcaagcctaaaatatgaaaaacagcgcagaaatgaggaaaatatgagaatatcaacaaaaggaagatatgcgttacgcctgatgctggatcttgcactgaataataccggagagccgatcagtttaaaggatattgcgagacgccaggaaatttcagataaatatttagagcagattatttccgttttaaataaggcaaaatatgtaaagagcattcgtggtgcacagggaggatacattctgacaaaaagaccggaagaatataccgtcggaatgatattacgcctgacagagggaagccttgcaccggtggcatgcgtcgaggatgaagacacctgtgataagatgaatgactgtgcaacagttctggtgtggaaaaaaatgaacgaggcgatcaaccaggttgttgacagtatcacactcgcagatttagtggactacgagagacagcgtgccggcgagtatgtaatctgaattttatgagaaaataagaagcgtgggaatggattgatccgacacagtggaagtaaaataataagccggaatttatcagtctgacacagtgggagtaaaataataaggaagaaagaaatggaaaaggcagtggattttacgagacttgaaaaaaatatcatcgaggtcatacaggaagaacagataaaacttggttaccggagtgaactgatccggttatattatccgattacctcgctgaaccgtttcttccataccgatgcagcagaaaaagagatgtcagaactgcttgcagaattttcaaaaaagacgatgcagacacttggcggggtggaaatctccaataaaggtgagcgtttttgcattgcaattccgccgagcggtgttgattatgtgcatgaacacacgaacggaagtgagttcatttccagttttatagaaacaatcggaagacatggctgcacgatagacgagcttttacagcagtttcacagatattcggatcatgtacatgtagaacggacgacacacggggaatttgattatctggtttactttgaggatggggtgccggatgattaccgttactgcatcacggatgagggctgccatctgatctatcatcgttttacaccggaagattatgaagattttcagttttaaaatatagaagattaaaataaatcaataaaattgataaaattacaccttgcggaactcgaaaaaggtatgttattatgtagaacagaaaatgaaatgcaatgaaaaggaatagtaacagcggaatggaaatcagagaactgccggaaggtgcgaggcagtcagagtgaagttgtgaactcgccttggagctgccggctgaaggaatcggatgcattatgaatgagcagatgatactgggtaggcttggacggatcgcccgccgtaagagggaaaaggcatgatagtgccggatgagtgcatgcatgacgatacaggtcattcatgaaacagagtggtaccgcgtgaagaaaattttgcgtctctgtatgacaaaaccacacaggttttgcatacagagattttttgtatcatgagaaattattatgacattttttcttacacaaaaagctctccggacagaaaacagaaagtgacacacagaaaatagaatcattgttaaaacaggataaggagaatgaatatgaattttgatgttgcagaaaaatacggaaaagcatattttatgccgccggaagttacatatgactgggtaaagaaggatgcgatcgaaaagccgccgatctggtgcagcgtggatctgcgtgatggcaaccaggcactgatcgagccgatgagcttagaggaaaaaattgaatttttccagatgcttgtagacattggattcaaggagatcgaggttggtttcccggcagcttcagagacagagtacaatttcatgcgtgccttaatcgagcgcaatatgatcccggaagatgttaccgttcaggttttaacacaggcgcgtgagcacatcattaaaaaaacatttgaggcagtcaaaggcgcaccgcacgcagtgatccatctttacaactccacctctgttgcacagagagagcaggtctttaaaaagagcagggaagaagtaaagaaacttgcagtggatggagcgattctgttaagagatcttgcagcacagacagatggaaactttacatttgagtacagcccggagagcttccctggaacagaggtcgactatgccgtggaagtctgcaacgccgtactggatgtgtggaaaccggataaggaacacaaagcgatcatcaacattccgactacggttcagattgcaatgccgcatgtatttgcatgccagatcgagtatattcacaaacatttaaaatacagagataacgtgatcttaagcgtacatccgcacaacgacagaggctgtggtatcagtgatgctgagtttggtgtattagcgggagctgaccgtgtggaaggtactctgtttggaaatggagagcgtaccggaaacgtggatatcgtgacacttgcaatgaatatggtatgccacggcgtagatccgaaacttgatttctccaacattgcagcaatccgtgagaaatatgagcgttttaccagaatgagagtttatgagcgtactccgtatgccggagatcttgtgtttactgcattttccggttcccatcaggatgcgatctcaaaaggtatggcatggagagaggcaggaaagagcggcgggcgctgggatgttccgtatctgccgatcgatccgaaggatgtcggaagagagtacgaatccgatgtgatccgaatcaatagccagtccggtaagggaggagttgctttcgtattaaaacagaactttggcatgtccctgccggataagatgaaagaggaagtcggttatctgatcaaaggtgtatccgatcacagacacgaagagctgacaccggatatgatctatcaggtatttaccgggaattacgtcaatatcaaagatgtatttgatgtgccgtattgccatttcgagcagaaagacggcattgccgcaagtgtgacgatcgagcagaacggtgagcgcagagtgatcgagacaagcggaaacggacgcctcgatgcggtcagcaacgcaatcaagatgtattttggcatcagctatgagctggcaacctaccaggagcatgcaatctcagagggatcttcctcaaaagcagcggcttatgtggagatcatctgtcagggcagacatttctggggcgtcggcgtggatgaggatatcatcaagagttccatcgcagcactggtttctgctgcaaataagatggcaaaaagcgaaaacatcattgagggcagagatgaacgcatcatggagatcatgaattacatccagaataactatgcggatgtgacgatggatgtcctggcagaaaaatttggactttccaaaccgtatctttccaaatatatcaaggaaaaatccggtatgacattccaggatgcagtgaaggctgcgcggatgaaaaaagcgagaagactgttaaaagagtcaaatcagacggtggagtcgattgcagcgagtgtgggatatgagaacgtggagcattttaaccgcctgttcaaaaaggcgtatgagatgacaccggtacagttccgcagacagtataaataaaaaaacaagaggtgcttccgggaatctgttccggtgagcacctcttgtttttgtgataacagatctgtttaaaatatgcacagattgttgtttgtgaaaatgatgtactaatatatagatgtatatatatcaggttatttaatatgttttttgatcgcatcaaaactttctttgctgatgacatgctccatacggcatgcatcttctgctgcaattttcgggtcgacaccgaggcgtgtcagccagtctgttaaaagttcgtgacgctcatagatcatttctgcaatttcacggccggaatcggtcagataaatatatccctctttcgtaacggtaatattattttttt

SEQ ID NO: 5213 - DNA, 4504 bp, Unknown
  gut microbiota DNA sequence
cactcgtacctcgttccagtaacggattttgccgatgcttcgcattccaaatcggcaaaatctgctaccaccactgtatcatacggcattttcagttcagaaaatgcctacctgtgaacagtaactttttttcaatggtttttacgcgtaatactgtgcctgtgtctgataaagtctggcgtagattccattttcggctaacagtgtgtcgtgtgttcccatctctgcaatgcttccggtatctaacacaacgatgcggtcacagaatttacagctgctcatgcggtgggaaatatagattgcagttttattttttaccatctcattaaagttctcgtagatctgcgcctcagcgatcggatctaaggctgcggtcggctcgtctaagatcacaaacggcgcatctttgtagagtgcgcgtgcgatggcaagccgctgtgcctcaccgccggagacatcgacacccgcaccgttgttgttataaagctgtgtcttcaggccgtccttcatcgctctcacacgcccggacagttcgacctggtctaacaccccccatgctctctcttcatccactgcactgcttgcagcaatattctcgccgaccggcagagaaaacattgcaaagtcctgaaagacaacggaaaatgccctcgtatattcctcatagttatatttccagatatcgatgccgtttaacgtgatcgtaccctccgtcggctcatagagacggcagagcaatttgatcaatgtcgtttttcctgcaccgttttgtccgactaacgccattttttccccaatattaaattttaagctgacatggcttaacacctgtgttccacagtccgggtaagcaaaacttacatcatgaaattcaaattcatattgtccgtcatcccgcttttcgatcggcaatgtaccatcgtaagccattgccggactttgtataaatttatcaaaaacgcttaaatattccgcacaaaattgaaaggaaatgacctgtgaaccaaattccgtaatacagttcacggtctgtgagatgacacctgcatataagatgacatttccgatatcgatcatcccgtttaatgctttcatgcctgccagcagatatgcagcgcctgctgcaaactggttgatgccctcaatcattcccctgtattttccatttacttttcccatctgtaaataaatactatagccctccaccatctgtctgaatttccccaaaaagagttttgacaggtcataaagtctgatatctttgctatttctttcatctgtcatgatcccggccagatagccgcccagtgcattattgtggtcatttgcatgtataaattcatactgtttcgcgctgagtatttttccaagatataaattcacaattacaacaactgcatataagccaatcaaaagcagcgttgatccataggagacaaaaaatgtttttttctgttcggcatcgattttcagcaacagcagaagaaaaaatacgaccgaataacacatggaaaaaaactgtacaaagatctggtaacaggtatccacctggtctttgatgtccccgcttccgcctgccgtaagttttgcgtgccttaatgcgtcaagcgtttcctgtttttcaaatttttcatactgcagttcaaatgccttgtctgccatctgctgtcttatgatctgctggcagctctctccgagtacttcgatccgtttctggcagaaccggttcaccagttcacagacaaactgcgacagcaaaagtgctgccacgcttttcacacatgcctcataatccccttcgatcgcattgtttaaaatctgtgccgaaaaataaaataccagaaacggaacggttgctttcataaatccgccggctgccatgacaacagccacatcttttttccctttgctgatcatctttataaaacttttaaattcctgccatatgttcttcatgtgactgtgccccttcctctttgtaatatctgctctgtaccaggaacatttcggcatatccgccattttcctgcatcagttcctcatgggtgccctcctctgtgatctttccgttttccaggaataaaatatggtcacagaaccgcgtcgatgccagacggtgtgaaataaacagtgccgtttttccagtcagcatttcattgtatttctcatacatctcattttctgcgatcgcatctaatgctgcggtcggctcatccaaaagcaacagtgcacatcctttatagagcgcacgcgcaagcatcagtttctgtgtctccccgccggaaagatggatgccatcctcacttacctcttttccgataaatgtgttctctttctgtggaagtttttgtattttctcccagaggccggcatcctttaatgcctccctgcatttttccgcatcatagtcctctcccatgctgcatgttacattgtccgcaatggaaaaggaataggtaaatgcatcctgaaagactgctgcaagcgaccggtaccacacatcaagatccatcgtggcaagatccgttccgttaatgtaaatgtgtccctcatccggcatataaaaaccgcagagcagtttgacaatcgttgattttccggcgccgttgatgccgactaacgccatctttccgccttttttaatgcgaaagttcacatcatctaatatcttatggtctgtgcccggataggaaaaactgacatgtgaaaattcgacttccactgcctccttttcatcctttaaccggactccctcgccatggtgatatacattctctaactctgtaaattcctgcatctgtccgaccggctttaagcaggatgaaatctggctgatcatcatcgtaagttccgaaaaataggtggaaaatccactgacgatcccgatataaagcacaaaacgtgcgatggacattccctgcatcagctgtccgatcagatagccgtaacagaccacatccctgccaagctgcagcagcagcccaaagagatcatccgcaaaataacatgccttttcttttgccagcagtgcctggtattttttgtttgcagcacggtaatgtccgcttaaccattctttcatctggtaaagccttatatcttttccgttttccactgcatatgcctgacggtccagatagtcctgtgtcactgtaagtttcgcctttgcatcacggtgttttaattcgtaattatttgccagtttatagcttaagatctggaccagtgaaatgataaccaaaagcacgaccagccatgccgatacaccggagatcagggatgcgtacaggatcaatgccccggcttcctttaagagttcgacgtcgtaatgaagcacaccctcgatgccccggtagtttccgctgactgcctctcccgctttctttaaaagctgctggactttttcgtcctcgcactgcacatagtcgagtgacatatatttctgataggtgcattcaatcattgtgccgcagcggaattttacatactggaactggtttctccgtttcagatatccggttatgatgcaccagatgctgtatccgacaaaaaatgttaccagttttgcgactactccgggcagtgtttcctgggtgatcatgcctttttggtactgctctaaaaacgctacgatcatggatgggatcagtatggtgccgaagcctttgccgatctgggtgatgatctcggcgagagcatagaagatggtggatctgtcgtagtgccatagttcgcggaggatgtagcgctggttggatgcggcggtgtaagttttcggttggttcatgttgtgtggctcctctcgttttggggtggtggtgttatatcacttctatgtctatactctatcagctttttgaactttcacacaaaaagtgcacggaaggtcatcttccgtgcaccaacggtatcgccaatatacaaaaggctggaatgaaaaggtgtggctgacacaccggtctgccaccacaacctgacggccataccttttctccccggcttttacccaaacttttacagcggcagcataatctccgtcacaaacacccccggctcattctgtctgttaatgtacccgccatacttttcaaccaccagattgatccgttttaatccatgcccgtgatttccccgttttttactgatgtactccgaatccatcttgcgcactgtctcatttgtcgcgttcgacaccgaaatgtaaagctgttttttgagtactccgatataaaggcggataaacggtttttccgtggtcagtttctcacaggactccactgcattgtctaacaggtttccgatcagggcacacagatcgatatcgctgacggcaagtgtttccgggcattttgcctgataatcgatagcgattccgtttttctgtgctaaggatatttttgaatttaagatggcatctaaattgacatttccagtctcgatcagctggttgacgtgatctaaatcctgctccaacaatcctaaatattcctctaacctgtcatac

SEQ ID NO: 5214 - DNA, 31671 bp, Unknown
  gut microbiota DNA sequence
ttttaatccatgcccgtgattcccccgcttttgactgatatattccgaatccatcttccgcaccgtctcattcgttgcgtttgacaccgaaatataaagctgttttttgagcacgccgatataaaggcggataaacggtttctccgctgtaagtttctcacaggactccactgcattgtctaacaggtttccgatcagagcacagaggtcgatatcactgacagcaagtgtttccggacattttgcctgatagtcgatctcaattccgtttttctgtgctaaggatattttcgaatttaaaatagcatccaaattgacatttccagtctcaatcagctgattgacgtgatctaagtcctgctccagcagtcctaaatattcctctaacctgtcatattctcccatcttgacatacgctttcattgcctgcaggtgattgtgataatcatgccgccagccgcgcatggtaagatagatattttgtacctcctgcacctgcttttcaagcagggcattctgatactccatattcttctcttctaaatattttgtgatcagcggtattctcatttttcgcacatatccccatgttccatataataacggataaacgcttcattcacactcttataagcattcctgctcaccggcacactgctgccgtcacaaagaatgcactccgtgcgctgcacgcgctccaccgcagcaaggctgacaataaagctcctgtgcgtgctgacaaatttttctgcctgttccggctgattttccatcaattctcctgctatttcagaaaggttctttttgtattcataatcacccacgctcgtgtgcagacggatataatgccctttcgcctccacactgtaaatggtatcgaccggaatttttacagtctccccacccacattttcgatcagatagcgcctttctttgccaagcgcataagaaatctcatccagcagagaaaacaactttgtctcctccaccggttttaaaagatagcgcaatgcgccaacctcatacccttcaaacacatactcactgcggttcgtcaaaaaaacgatgggaagtttttgatcttttttccggatctcctttgcgagcgccatgccatccatgccgtccatatcaatatccaaaaggagcagatcgaacgggaaactgtccggatgctcaaacaacagctccttcgcactgccatagccaaaatatgtaacagtgtcattcccttcgtctgcccactttttgatcagttgctccatatattctaactggatcttttcatcttcacaatatgcaatattcattctattcctgatccttgcatttttgttactgttcacacacaagtgtgacccgtaacttatttttacctgacttttcagcctcccactgttattttctgtctgatctattctgcataagactccagatcctgtgccagcagataagtagcatcaatgatctctttggtctgtttcattgcctctaccgcatgttctgctgtctgaagtccttctgtggaagaagcagctatttcttcaccggttgcagagagattcgatatactctgggaaattgtgtctgtactgtttaaaatggactgcatacttccctcgatctctccgattgcacttgccagtgactgcatttcgtcattgatggtctcaaatttattctttgttgtctcaatcagttcgttctgttcacggattgaatccgcagaatgttccatactgtccatcgcatgttgtgcatcttcattcagatcctgaatgatatccgtaatccggttcgttgcatcttttgtctgctccgataactgacggatttcttccgcaacgactgcaaacccttttcctgcctcacctgctcttgctgcctcaatagaagcattcaatgcaagaagattggtctggctggagatacttaagatagtcgcaacaattccttttacttcctccacacggttgctgacctgtttggtggactctgccgcctggttacttgcctgctccacattgtcagcctgattttttaatcctgttaccagtctcgcaccctctgccacattctccatcgtatgatttgccttatcaatcatcgcttcggtttctttttctgcactgtccgtattcttatggatttcctcacacatcaatgcctgctgctggattgcctccgcagtacttcccgtgctctgggcaatattggaaatagattcattgttgttattgatgacttcctctaatgtctctaatttttcttttgcggaatcaaaatgtttcaccagattttccgctgtagccagcattttttcagatgctgcagcctgcatttccagattttcttcactaaattttgtaaggaggatagatgcttcatataccgcataaactactgttgcaagaatgataatactaaaaaaaagttctatcccatcggctctttttgtaataacctgcactatgatatgaatgatatttcctactgcagttacaccaataccataatatacaaactttacatctaaatacaaaacacatgcaacaaagagcgggattccatatgcgtaaacaaaattattctgattcagtaaaagaaatacacaatatacagcacttcctgttccaagcaggatttccccacccttttttgaattccaaaacttttttgcataagtattcacaacaataattcccgcaactgcagctgcagtctgaagcagtatcgtaatcttaaactccgccagacatgccataacagacagaatcgtcatcactgccagcaggattattaccacattatatactcttttatttgctcttacatattgttctcctgtcatctaaatccctcttcctttcgcttttgaatatacttgcataattatagtacacccctcaataaaaacacacaatacttattacaaatttttttcatacttttcgacatattgcgccataaaatgtgctgtgataaactaaagatatttaaaatatttcacattttgctgctttcagatgaggttattatgaacttaaaacaatatatcagacatcttctttatgataatacaacttatgaatcaccagatatttatcagcgtttccgcattgtctgtccggagtattcgcagcacgatatcgaagtcaaaccatatccccttccggaatcagagcacatgtttggcctgatctgggatatccacgaacctcacactgtttctgccacgatcatcccctcctctaccgcctttacttacgagaaacggtttgaaccgggcatgcgcacccagatgcactcacatgaatatctcgaacttttttatatcgtggacggcgaataccgtcagaagatcctcggcaatgaatttactttccacaagggggaactctgcctgatcgaccgcaactgtgaacatcaggaaatcttagacagtggttcttccacgatcttatttctcggtatcacaaatgctatttttaatgatatcatgaaacatctgagcacttccggaagaattgcctcttttttaaatatggcattattagagcagaaaaatctgcagcagtatctgcatttccgtccacagccggagggtatggaaaaaatggaacaggcgctttatcagctgctgtccgagttaaaacagcatgatgttgcctcccctttgatctgtcaaggattactgctgcgtattttcaggattcttggaacaaattatgaattttcgctgtcaaaacaactgcgaaaacagatgaactggattttatttgaagagatcacagattatatggaaaatcatctgacccagatttccattacaggactttctgaggaatttcattttcaggaagattattttaaccgtctcataaaaacacagaccgggcttacctatacggaatacttacagcttctgcgcctgcgccgcgctgaaacgctgcttcttacgaccgatgccacgatcgaccagatcacggaagcggtcggttaccacaacaaaggttatttctataaaatatttacggaacggcaccagcttacgccggcacagttccgcaaaaagatgtaactattttttcagatttatcttacagattccatttccagtctcttacctcaggcagatcctgaccgtactcgtggatgtactgtttgtgctctacgagtttgtcgttcatctgctgtaccagataagatcctctgtttccaagctgtggcagatatttgatgacgttctttactaagtggaaacggtcgatttcgttttgtacacgcatatcaaacggtgttgtaatcgtaccttcctcctgataaccgtaaacgtggatgttgcggttggttctgcggtaggtcagctcatggatcagtgtgtgataaccgtggaatgcaaaaatgatcggtttgtcttttgtaaagagtgcatcgtattctgcatcgctgagtccgtgcggatgtttcgtgttcggctctaatttcatgagatcgacaacgttgatcacacggatcttaatctccggcagtgcctctcttaagatcgtaacggctgccaatgtctctaatgtcggtgtatcaccgcagcatgccataactacatccggctcttcgccctggtcgttgcttgcccactcccagatgccgataccctgtgtacagtgtttgactgcctgctccatggtcagccactgctgtctcggatgtttggatgtcacgagcacattgacatagttgcggctgcggatacagtgatcgaagcaggataataaacagtttgcatctggcggcagataaaggcgtaccacgtctgattttttatttgcaatgtggtctaagaaccccggatcctgatgtgtaaatccattgtgatcctgctgccatacattcgagcttaaaatcaggttcaaggatgcaatggactgtctccacggaagctggttgcaaacctttaaccattttgcatgctgtgcacacatggaatcaaccacacggataaatgcctcataacttgcaaagaatccatgacgtccggttaacagatatccctctaaccatccctcacacatatgctcactcaacatagagtccatgacacgtccgtcatgtgcaaggaattcatccgtatcataagcctcaccgttccagtcacggttcgttgcctcaaatacttttccaagacggtttgacatcgtctcatccggtccgaaaatacggaagttctttgcatcttcatttaactcgaaaatatctctgacaaatccgccaagttcgatcatatcctgcgcttccacagcacccggctttggaacatccacagcataatctttaaaatcaggcagacgcagatcgcgcagtaatttacccccgtttgcatgcgggtttgatccaatcctgcggtcgccggtcggtgctaatgcctttaattccggaatcagttttccgtcctcatcaaacagctcctccggatgataacttaacagccagtcttttaacatctgaagatgttccggtttgtccatcatgatcggaacctgatgtgcacggaaagagccttcgatctgattgccatccactacctttggtcctgtccagcccttcggggtgcggagtacgatcatcggccatttcggtctggtcagatcatcattttctctcgcatttttctggatcgccttgatctcatccatcgcctgatctaaggcagccgccatcttgctgtgcatatccatcggctcatcgccctccacgaaatacggtttccagccgcatccgtcgaagaaatgctctaattcttcacgggaaatacgtgctaagatggtcgggttgctgatcttatatccgttcagatgcaggatcggtaaaaccgcaccgtctgttttcgggtttaaaaatttgttgcactgccaggaagttgcaagcggtccagtctcggactcaccgtctccgacgatacatgctgcaaccagatccgggttgtcaaataccgcaccaaaagagtgtgccagtgaatatccaagctcaccgccctcgttgatggaaccaggagtttccggtgcaacatggcttgagatacctcccgggaaagaaaactgtttacacagttttttcagtccgtccatatcctctccgatgttcggatatacctcgctgtaagttccctctaaatatgtatttgccacaaaaaagtttccaccgtggccaggaccggaaattaagatcatatcctgatcatattttttgatgacacggtttaaatgaacgtatacaaagttctgtcccggaacggttccccagtgtccgacgatctttttctttatatgatccatcgtcaacggctcgcgtaataacgggttgtccagtaaatataactgtgctgctccaagatagtttgccgcacgccaataggcatccatttttttcaggtactctttggtaacaggctgcttttccacagcgtttacttctgccatgctgctttttcctcctttattgaaacatttcctgtctcgtttgttatattttagacaatcttttttcggagggcaatttcccattcctgttatcttgtaaaaaagttacctgatccgactggttgtgtgacagcctttttagtttttcctgacagcaagacagtaattaacatgctcaaaggctttcatatccgcccctgccttgtcgataatatccctttgaatatcatccggtgtcaacaactcataaatcagaaagccatgtttctccaggagtttttcaatctcgctataggaaaaggctgattgcattggctcgtcacctgcttttgccatcataattgtgttctgcacacgcttttcggaagcatcaaagaaattctcatctggataatcaaacacaagcgaactcccatccgcacaaagttcggaaagtgcagccaacatcgtattgattgcttccgtcgaaagataatacgttacgccgagccatgagaaaaatgttttcacagatgcgtcaaacccccatcgatcagacgttccgctacattatctttcgtaaaatccgcaggaacaaaggtgagattatcaggaatcgtccaaccggcacgggtgatccgttctattttatctttctgcgtcaggggatgatcgacttcaaataccctatgttttgataagaattctttttcccgaaaagcgaaggtatccagacctgcgccgagcataacatattgctttgtgccagtcagaacggcggcatattcttctgctgtcatcagctcttttgcaagatgatccgcgaaaaccggatgatcttcattttctgcatgaaacgcccgtccaaatgaactcatcagggcagtaatactaacttcgttattaattcctttgtcctccatgtttgatgtttcccatatttttcttccatttctttcgtatttgcatgaaacagctccagtgcccgtatgaagcagttgcatttctacggtaagacctgtgtcatttacaggcgtgctgagtgtattgattacaaaacgcagagcaaaccttcatctatcaggtcttgctctgcgtctaagcgtctggcgttttaatttcttcaattttttttatttctaaaataaatcacacaagtatatttacatttcggacaaaataacggaaaatcctctaactaatttcttttctatattttcaaccatttataccacctcaccttttcctgattgcaatgatctttacgctctcttaacctcttgaatcgtcataatagctcaagcgaaatctgcgtggttcgttatgcgtttttctcatataactttctcattgcgctgccaatactgcatctctaagatacattttatccatgtcgcaccctcatcatattcgtacttcaaggatagagttgattatctgtcggaaaccatagtcgaggaactcctcttctgtcataccattctgcgcgcaaatgaattttccctttgtctcggcaagcgcaagcagcgaatcaatgcttgtggagaggacatagaccgtcagcacaggaacaacttcttttcttacctcgccgcttttctgcccacgcacaatgagtgtttcaagaatctcatttatctccgtcccaaggcaaagtatatttttcactgtatctgaagctgccacttgctcgatctccgccgcgccagaacgcttcaaggtttcaagcgagtggggatactatgtaattttgacattgtcaaccaaaaaatcgcaaaggaattttcaccgcataaaatacatggaacgccgcggaagtggtctacgcaaattttggctttctgcatagaatccaaatcaaagaaagagcttgcatcattttgcggcttcaaagatttaaggaacttcactttgaaacatatcaacccgtttgggtataagaaaaccccggaaagccttgattttccggggtttgtaaacataattcgattgtctctttcgagataattatctctttgaaaactgtggagcgcgacgagctgctttgagaccgtatttcttacgctctttcatacgaggatcacgtgttaagaatcctgctttctttaatactggtctgtagtcagcatctacatttaataatgcacgagcgataccatgacggatagctcctgcctgtcctgtgtatccaccaccgcgaacgtttactaaaacgtcgaatttatcagctgtctcggtagcagttaaaggctgacgaacaacaacctttaatgtctctaatccgaaatactcatccatatctcttttattgatggtaattttacctgtacctggtactaaatatactctggcaacagatgattttcttcttcctgttccgtaatactttgtattagccactgtttttccctcctaattaaaatgttaaagcttcaggtttctgagctgcatgcttgtgatccggtccaacgtatacgaataattttgtatacatctctcttcctaaaggtccctttggaagcatgccttttactgcgtgctcgataactctttccggatgttttgctaacatttcttttaaggtagtctctttcataccacctacataatcagagtgattgtagtagatcttctgctctaatttcttaccggttactttgatcttctcagcgttaacaacgattacataatcacctgtgtcgatgtgcggtgtaaagattggtttattctttcctcttaatactttagcaacttcagatgctaaacgtcctaatgtcataccttcagcgtcaactacataccattttctatcaatggtagctgggctagccataaaagttttcattgatcttcctcctagaaataatgttacggaacacctctgcaatgtgaatgtccaggacacaccgcttggtattcaataaattgtttatagtttaaatgtcgctccggggctttggattgacattacttcactatcacagacttaaatagtatagtacacgacgccttgtgtgtcaagaatttttttactttagatcaaactttttacaaataaaactatcttccaaattaactctgaaagaggcggatatcctttatcagatgtccgcctctaatctgcctatttcgttatctcaaacttaaatttattactgctccatacattgtccttaaaatgaatttcgattgttttccagtccgccgggacctcatacccaatcacaccattcatttttttccctgctgcaatggttccatctaactgattttgatcatttttctccaaaagagcactcactgaataattcagtgcataatcgtccgcatatgcttcaaaactcgccatactgcttatatttatctcagaatcagaattatttgcgatttcaaactctaccagaacaaactcatttccatctgccggtttattatactctgacccgctgctctgcgtataattgaccattgtaacctgcacatcattcatttctgcagtttcaccaataccaaatatatccttctcactatcttcttgtttgacagaggtatcttctgtagtatcattcaccacatcagccttgttatctgtattattctgcgtcgaggcattctctacctttttcggtttatccgctccaccgcccgacattgctgcaataataataaccaccaccacaacgatcacgatccatttcccgataccgccctgtttctttctgcagtttgggcagaccttcgcgcctttcggtatctcactcttacagtgtttgcacaactttgtttcattttccatttcataatcctccttgttttgcggagcaaaatgcgagccctttggtgagcaatgcccagcactcttggcacggattttactcctttgttttactactttttatttcatcctactttatactactttatcccacttagtggtatatgtcaaccatttatcgtatatataaaaatagagttatttaatcgaaaacgaaatgaggctgtctatgaaaccattaaaaaataaagtaagcatcacacttgattcagacatcattgaacagttaaagctcctcgccgagcaggacgaccgttctttttcccaatatatcaatatgatattgaaagaatatctgacccaggcggacaaaaagaaagaagcgtaaaacatctctgtcttatgcttctctcatcttagccgtatttcatttatttttggtatgcaccgtgcatacattttcacattatataatgttgagttcaaatagtaagttcaatttttgactgtcaaattacatttaaaataatattgcttctaagatcgcgcagatggcagctgcagcaaaaagaaatataaattccgctgcagcataaccgatcagtcttacgaaccggttcttactgtttacaaccggtatgtttctccgcattcccatataatcacagacaaaaaatataaatacgatctgcgacagccagaccaccagccgttccagtgtcaattttgactgcgggagcagttttccattcgcatcatgcgcttctaacgaccacgcggtaactgtggtcagtgcatatcctatgactgcgacgatcattttccatacttttcctgtccgaaatcccggtattttataaaaaggaatttcaccggcttgatcttttttacagctctgcgcacaataaaacttatttttatcactatccatactactgcaggggatttccgctgcattgcagatatccgccttaagttcatccacattctgataccggtcctcagggtttatcttaatgcattttaacacaatcgtcctgaattttccttcggtcagcttttccatcgggaactctctcacaagcatataattaagcagcacacccatcgcataaatatcggttctcgcatccgtctgtccgaacccaaactgttccggcgctgcatagccttgcgttcccatcataacagtatcctttgacttgccaggctggtagattctcgcaatgtcaaaatcgaccagcttcacttccccctcattggtcagaatcacattctctgctttcaagtctctgcatatgactggcatttttgcatggtgcaaagggtaaagcgcattgcacagacagattatgatatcagcagcgtctttctccgaaaaatatttttcttttaacatttcttccagattttttccgctcaagtactcctcgatcacgatcagattcgtatcggtctgaatacactcatagatctttggtatatacgcattcggattttcctttaaaaaaagataaatctcctccaggtccaatgcaacatactttcgcacaccaatcacaccattcacttggtttcttacgatatgtactttttcattgtcacccagtctgccaagatccacatattctgacaaacagtactcctcatctaaccgcatataatttcccaccattttcttgcattcatctttacaacacgatattataaatgtcagggcagttcatgcgcccaaaccagcatttacaatttgtagtataaaaatattttattattttttacagtacaattcaaggagactttatggatcagaaaacgaccggcgaactgatgcagcttctctcttccgccaaaaatatttccgatttaaaacaatacactgacgcacttgcagacatgacatcttccgtgacctttccggaatatttaaatgaactgatgcatgcccgcggcgtgaccgcctcaaaactgatctctgcagcccagattcagcgcaattacggctatcagatcttagacggcaggcgaagtccctcccgtgataaagtcatttctctctgccttgcactaaagcttgagctcccggaaacacagcgtgctctcacgctcacaaaaaacggacagctctattccaaaaacaaacgggattccatcctcatttttgcttttgggaaaaagctgtccgtaattgacacaaacgtgcttttagaagaaatgaatgagcctgttttaaactgacttctgcatcattcaaaaacatcctgccctgttgtaacatcttttcaaagtgcacttctttctcattctacgttttcaaactcgatccccatcatcgtaagcccgtgtgccggcgccgtaggccctgccgcgctgcggtctttctttgcaagaatttcttttaccgcctccggttcgatcgcaccaccgccaacctgcactaatgtccctgcaatgatccgtaccatattgtaaaggaaaccgtttcccgtcacgcggatcgtgatgatatctccttctttttccacatcacaggcatagatcgtgcgcaccgtcgtctttacctgtgcaccgatcgcacaaaaactcttaaaatcatgctctcccccaagataagatgccgcttttttcattttctccacatccagtggataatgataaaaataggtatccagccgtcttgtcggcatacggaatgtccggtttaaaatacggtattcataagtttttctgctgttctgatagcgcggatgccagccatcctccacctcacaggatccctgcaccacaatatcttccggcagtctctgattgagtgcaaatgcaattttatctgccggcatcctcgtgtttgtatcaaatactgcaatatttccaagggaatgtacacccgaatccgtccggctcgcaccgctcaccacgatctgctcgcccagaagattcgaaagattcttatttagcacttcttctatcgtgataccgttcggctgcacctgccatcctttgtaattcgttccgtcatacgccacgatcatttttacacgcatagtaatctcctgttctgagccgcatgctgcgataaagcggcaacaatctgaccttcccgcagacatatttttatatattgccgtaaaagccgcttgtttttccaacagacaaatatccctggaatcaagcttatttttcacgctgactttctgttctgtttataaaatccgtagaacagaatagtccgtgcacttcaatatccaatgggtgaaaacctaatctctcagcatcatttcgcccattccttctttcttttcaacatctttttcactgttttgggcgaaatccttctattttcccgtttcaccctggatttttcatttttgcgggctatttacgctggttcatgtcattttcgcccattttcctgtattttgactgattttctatcaacaaatggatgaattacttctatttttcatctgtttcgcccatgttcaaactttgtatggatggaacttcttcttagccaggtgaatattcctcctgtgagattttttcattcataagattcgggtggcaaagggtggcacacaacttagtggttgtcaaattgcacaaagccgctcctattttccagctttgtgcaatacccttccaaaatgacaaactgccctgccggcattccatcatgaacctcagcctgccggcactgcaaaaatttcccgcgtcataacttaccttactgcggaaacggtaaaaagaacctgcacagcaaaataaccacaaaatacccgatcacaagcacatatgctttatgatccacgcctgcgtaacgcagaggtttcatcttggttctgccctcgccgccattgtagcagcgcgcttccatcgccatcgcaaggtcgtctgctcgacggaacgcagagacgaataacggtaccaaaagaggaatcatgtttttcactctcagtaacagatttccgctctcaaagtcagcacctctcgccatctgtgccttcatgatcttgtctgtctcctcgatgaggatcgggataaaacgaagtgcaatcgacatcatcatcgcgatcgcatgaaccggaacaccgatctttgataacggcatcagtgatttttccagaccgtccgtgagctggtttggtgtcgtcgtaagtgtcatgatcgaggttccaaggatcaggtaggtcagacggatcgccatcagaatcgcattctgtgccccctctgccgtgatcttaaagatccagaatttcacgatcggcgtaccaggtgtcagaaaaaggttgaatgccgccgtgatcagcatcagcaccacgatcgccttcaagccctttaccataaacttaaatggaactttggacgttctgatgcagaagatcaaaaatacagtcgcaaccagaagtgccgcaatccctttaaaacaaaacaatgatataatataaataaatgtagcaaacagttttacgcgcgggtccagtttatgaatgacggaatccgctggataatactggcccagtgtaatatctcttaacatcttcttcctccgaaccgttacatatgaaagtctgtttttccagaatctattccggtcagcgcctcgagcagacaagctcttgcctccgccaccgtggttgcatctgtatccacattcagacctttttccttcagttcatgcatcaggtaagtcacctgcggtgctgcaagtccaaccgcctcaagttctttgtagtggcggaatacttcttttggcgcaccgtctaacatcacactgccgtgattcatcacgataatacgctccacatattttgcgacgtcctccatgctgtgcgatactaaaataaccgtaataccgcgttccctgtgcatccgctccacaagatctaagatctcatcacgtcctgccggatcaagtcccgccgtcggctcatctaagatcaatacctccggcttcatggcaagcacgcccgcaatcgcaacacggcgtttctgtccaccggaaagatcaaacggagactggtaataaagctcctccggcagtccgacactccgcagcgcctcaaatgcccgaagacctgcctcctctttcgacaatccctgatttttcggtccgaaacacacgtcgtcaaagatcgttgtctcaaacaactgatgctccggatactgaaataccagcccgacgcggtttctcaattcacgcaggtcaaaatcatcttcataaatatcctgaccatgaaaatagatcgtcccggatgtcgccttcatcagaccgttcaagtgctggatcaaggtggactttccggaaccggtatgtccgatcacgccgataaactgtccatcctcgatcgttaagtttacatcctttaacgcctggatctggtacgcagtcccttcgctgtatacataattcactttatctaaaataattgacatgttcatcctcatttctggggcacccactgcagagcagcaccccaaaagccttccattttactcaaaatcagatgatcttttaaaaacatataaccataaaatgcctgctctactgatattccatctctgcgctccacatcatacacattccacaatcatgctatcatcgtgctccacatcatacacattccatgatcatgaatcgatctgtgcgattcgcagaatatgccccacaagttcttcccgcgtcagcacgccaagcggaatatcaagtcctgactgtctgagcaggtcagcaaggatcgtaacctgcggtacatccagccggtattcctttaactttccgacctgggaaaaaatttcgcgcggtgtcccctgcatgacaactttccccttgtccatcacaatcaccttatctgcaccaacgacttcttccatataatgtgtgatcagaatgatcgtgacaccctttttctgattgagttcatgcgcagtgcggatgacatccgctcttccgtttgggtcaagcattgcggtcggctcgtctaacacgatgcactttggctccatcgctacgacacccgcgatcgcaacgcgctgtttctgacctccggaaagtttgtttggcgaatgatgacggtattttaacataccgactgcctttaaactctcctccacacgctgccagatctcatcggtcggcacaccgatattttccggtccgaatccgacatcctcctccactacactggcaatgatctgattgtccggattctggaaaaccattccggcggtctttcgcaccggaatgacattctcctcttttgaaacatccatgccgtccacaaaaagactaccctcggacggggctaacagtgcattgatatgctttgcaagcgtagatttaccggaaccgttatgtcctaaaattgcgataaaatctccctgcttcacatcgagatccacatgatctaaggcagtctggatcgactctacgtttccctcttcatcacgtctgatatattcatgcacaagctgttttgccttaataattcccatctgtttttattccttcccgtatcagtcatcccagcgcagtctgtgcagttctccctgcagcttcatatggtcaaactgattctgtctgagtgcctcatagagcacgatcgcaacggaatttgacaggttcagtgaacgtgtctccccgatcatcgggatccgcacacaggtatccggattggcttttaagatctcctccgggattcctgcactctcttttccaaacataatatagcagtccggctcgtaggaaacctctgtgtatacatggcgtccctttgtcgttgccatatagatctttgcacccggatttttctcacagaaatcatcccagttcacataggtcgtcacatcaagctcactccagtaatccatcccggcacgcttgatcgatttttcatcaagatgaaatccaagcggttcgatcagatggagccttgtccctgttgcgacacaggttcttccgatatttccggtatttgccgggatctccggctcatataaaacaatatttaactttgccataataatcctcatttccaggcagtctgccaaacagaccacaatatgaaaaataagctgtcatgcctgtttttcaccctgttttctcagccctgtaataaatgcctccatgcggttcatcgcctcttttaaattctccagcgaatacgcataggaaatacggataaatccttccccgcagtctccgaatgccgttcccggaacgactgcaagcttctctgtatttaaaagctccgtggcgaactgctcggatgtcataccgaattcgctgatgcacgggaacacataaaatgctccaaacggctcgaaacaggataatcccatctccttaaaacggtgcagcagatagcggcgtcttccgttgtattcctcacgcatctgtgccacatcctcatcaccgttttttaatgcctccacgcctgcgtactggctggtggacggtgcacacatgatcgcaaactggtggatctttaacatctgctcaatgatcacacgcggtccacatgcatagccgagacgccatcctgtcatggcatgtgatttggaaaaaccgttgatcacgatcgttctctcccacattcccggcagagacgcaatcgtcacatgtttctcaaggtaggtaagctctgaatagatctcgtcactcaatacaaaaatatcatgttttttgatcacttccgcgattttttcaagatctgatttttccatgattgccccggttggattgttcgggaacggaagtaccaaaagctttgtctttggcgtgatcgcagcctctaactcttctgcagtcagacgaaattctttttctgcttttaactcgatcacgaccggtactccgcctgctaaaacggcacacggcacataggacacataactcggctgtgggatcaaaacctcatcccccggatctaacatagcacgcattgccgcatcgattgcctcactgcctccgatcgtcaccatgatctcatgatccacgtcataagatatcccgtaatgacggttcagataacggtcgatctctgtctttaactcttttaaacctgcatttgaggtataatgtgtttttcctttttccagggaataaataccctcgtcgcggatatgccacggcgtatcaaaatccggctcgccgacaccaagggagattgcgtccttcatctcatgtaccacatcgaagaacttacggatcccggacggctggatcgttgtaattgttttatttaatggatctctcatattacatctctatcctttcatcttttgccggttctgccataacggttccgtgatctttgtattttttcagaataaaattcgtctttgtacttaaaacagaatcaagcggtgaaagtttattggaaacaaactgggaaacctcacgcagtgtctttccctcgatcgttaccataaaatcaaatccgccggagatcagataaacggaatttacttccggatagttgtaaatgcgctctgccaccttgtcaaatcccattccgcgctgtggtgtgacacgcacctcgattaaagctgtcaccttttcaattcccgccttatcccagtcgatcagggtatggtatccgcagataatatgctcctcttccattttctgaagctcatttaccacggctgcctcatctacacctaaaataattgccagttcctttaaatcaattctgctgttcttctctataaaagttaaaatcttttcacgcatgataatcctatcctccataatttgtactcttttgagcactgctttaatccataacaacagatctgcccgctaaacgaaacttgcagtctgtttttgtgtgaaaaatctgattttcacacattatacaactttatataattcgtccgtcttcggcggctctaaaaaccgtctctcatcctcatttaataaaactctgtcatttccggctgttgcttttccgataattgttgccggtattcctgcttttttcagttcatttaccagcagattgccatcggctgccgccatcagcatagaaccgcttgagatcagttcatatgggttgattccgaaaaattcacagatctcgattgtttcctgacgaacgggaatcttttttaaatcgatttcaagtccgacgccagatgcttctgccatttcccagagtgcaccaaagataccgccctctgtgacgtcatgcatagcactaacgccagaccgaacggcgactgcagcctctgaaagcacggataaatatacatccagttttttcgcattttcgataaatggtgcagaaaatcttgttaaaagatctttttctttttcctttgcaatgatggaggttccctcgatcccgatccactttgtcacaagaatatccatgcccggctttgcccctccggtagagatcaggcatccgtcttttactttgccgacaccacaaacggaaataaccggctggttgacaactgccgtgatctccgtatgaccgcccatgacctgcacgcctgcctttgcacatgcagcttctacctgctgcatcatctctcttagatcaggctcttcaatctccggtggaagcaagacagtaagcagaacgccgaccggctctgccccggcactggcaagatcatttgccgtaatctggattgcaagtgtaccgatatcctgtgccgttcctgtgatcggatctgttgacatcacaagtgtctcatcctctgccagcttgaccgccgcgcagtcctctcccacaccggcgcctaagacaacctccggtcttttggtatgtatctgtttaaatacggagcgtttgagcacattctccggtacttttccaatcttcatcgcaaactccatccctgtttatagttataggctgtctcttacgaggcagcctctttttgtttcttataataaattactgaccatttccaccgttatctccgctgacgtccacctgtccgtctccgacaattgcctgttcctctgcagactggttctctgccggctgttccggtgtggctgctgccgctgcagtaaactgggcaactgcggcatagatcgttccttcatcaccggtcgccaacgccgcaccgattgtcgctgatgcattcggatcttccgatgccgttccaacgtttacgatctttggtgatgccttataagtactcttattaaatacttcgcggctctcttcgacaccatctaccgtaacgactttccagagctgtgccacatatccgacatgttttccctgggatacactcatagttcccaccggatctccggttgcaacaaactgtgtgcccggatcctgttctgatacaacttcactctcatatgtcaccttacggtttgcaggtcttgtctcttccccgtaaatattgaagtaaacattttttcctgaagtatatccttcaatatagatcggtacgtcctgattattgacaaattttaaatccttgtaatcgcctgcgatcgcagcatccatggatggtttgacataggtaacgatcatagaatggttcgaacgctcggtaacttcaagttccgctaaaataactgcattatataatgttgtggaaacctggcagacgccaccgccataggactgtacggtctgtccattttcataggctccggccagttcatacccattggctgcatctaacggtccgatcgtctcataaacagaaaactcttctcccggatataaaacagttccattgatcttgcctgctgccgttgcaatattgtcacagcggttctgggtagaagaactgtaattcgtattgaatccaccgagcagatcttttaccttagaaagctcttcctcgcttcccttcggctccacgatctctgctgtaagttcaatatttccaccctgtccgtcccagtcgttactgacgtaattttcgatcgctgcaatcgacttttctacgttgacttcaacaccctgcgaccctttaatgatcttaaatgttccattttcacgcaccagaccattgtccactgccttctgatcgagctcatccgctttctcggcaagcagttctgatactgtatcatgatctacgttcaacaccatatcaatgacaacactgccattttcaaggtctttcttatctttgtattttttaatcagattgccgctttttccgacatccatcgcctctgaaacaacattcatatcggtaaactcgagtgccagatccgatgcctttacctgcgtactatgctctcctgcagtcagtgtaaatacagcttcccctgcattatttacataatcagtcactgcattcaaagcttcctgttctgtcataccgccgacatcaatattgccaatataaactccctgcgcaatacggtctgtgtcttccgcttttgcctgcgtcggatttaaaatagcgccaaatgccacggctaaccccagagctgctaatattttacctgtttttttcatcttttccctctgaaactattacttttgctgaatctttgctgttcattttatcacaactgccctctttttcaaggtgcattaccacgaatatatttgactgtttgccctgtttttagtatattttacatgaacagatttattacaacagtgccgcaagtacagtcgtaagcagcatcgttccaaccagaatgatcacaactgctgcaagtacttttttatttttctttttactgaaatcatacatataaatgtacctccatttcaaaaaacacggcacggaaaggatttcacatgccatttttaggtttattcattgcagttgtctgcctgttcacatttttccgtaaacgttcaaaccgctcccaggagaacgtaactgaccgcttctggaaaagggaatccatcgcaaacaacacccgcttacaggatttaagcggactcccctatattaccataccttttgacaaatttccaataggtatgtacgaaaatgatttattaaaaaattatgaaaataccctgcagacgctttccgggcaaaagatcgtcaatttcggcacacagaccaatactgatctgaagatcacttacggtactgccagtctccctgccctgacggaatacgaacaaaattttaccacactctgtcagacgcttaccgcctatgccggacagcttttcgaactcggtcataccgatgatgcccgtacaattttagaatatggtatcagtatcggctccgacttaagccagaattatctgcttttagctaagatctatcagtcttccggcgaaaccggacggatccgggaactccttgcatccgcggaacagcttgattctctgatgaaacgttcgatcgtagaaaaactgaccgccatgctcccggaagataccgcaaatacgccggtacaatgatccgtatcatgcttcatagacatccggctcgttccacacataatattttatggcattttcccataggtggcgatcagccggtccgtcagtcttgacgcctcgctccttgtcatctccgggaaattttccggcagtttgatctgataatgcgccgcatattctcttaagtattttatctgccgtgccgttgccggcgtctgttttttcgccttataaagaagcggctttggcatgaaatctccggcagattcctcctcgtatcgttccctgagtgcctcgtaaacctgccatgtttcatatgcatcgtcaaatgcacgatgggcattttctctttttaccccaaagcaggcacacaggctttccagatcctttttctgctctttcggcaaaaatttccttgcaagttttaaggtatcaaccgcattccgttccaatggcatattatgatttaccgcccactgctttaaaaatccataatcaaaaatcacattctgcccaacgatgatatcctctccgataaattcaaagaactgccgcattgcctcttctttttccatgccgccctgcaccatcgcctccgtgatcccggtaagttcagtcactttttccggtatctttacgttctggcataaaattgcaccaaatttatcgaccgcctgatggttccggactctgactgcccctacttctaaaatatgatcggtctttgcattcagacctgtcatttcaagatcaatgactacataatcctgcatcctcatcctccatgatccacgtcaccttcgcctgatggtctaatggatccctgtccgtataatcgaacagcgcatacaatggttttcctgcccgtttgggcagttcttttaatacccgttcccctttatccggaaaacgataggaaaaacactccacatgcgactgctttccatttttgcagtatgcccgcgtcacctgtttccatacacttaaatcttttgcccaggcaggcctgctcttgcagttttcacggtaataaagatcaaagatcaggctttcttttatgatatccaggatttccagatgatcagcttttttccctgcctccgtaatattccgctgttctccggcagtgatatctccggcaaatgtttctttgataaattccagcaagatctccgagcgccggatcctcgcgtggctcatgccaaaatagccgtttctctcataatattttccaagctcctgaaacatgaaaaatgcgctcttaaataaaactccgagcaccttcatcgtaatttcaaactgcccgctgttataatacacttccagcatctcttccacctgacgtatctttaagacatcctcatagggaagccactttgtcttcagcacttcatagggcggtctgctgtggtattcgatctcatattctttcgcatgctcatacatataggagccctttaacacctttaagaatccaagctggagctggtttgggcggagttcatagatctcatcaaaggattttgcaaacgtgtcataatcttcaaatgggagtcctgcgatcagatccagatgctcatggatattctcatgtttctgaacttctttcacaacttcctttaaccgttctaactgcatggtgcggtggatctctctgatcgtcgccccgttcgtcgactgcacaccgatctctaactggatcagccccggccgcatcgttccgatcaatgcaagttcttcttccctcaatagatctgcagagatctcaaaatggaaattggtgattccgttatcatgttccttaatgtaagaccagatctccattgcatgcgcatgattacagttgaatgtcctgtccacaaattttacctgcggcacttcccggtcaataaaaaactgcagttcctttttcacaagctccgcatcccggaagcgaagctgcttttccacagaggaaagacagtaactgcaggaaaacggacagccacggctcgactcataataaatgatacggtttttaaaatcgcccgccttgtcatagcagaatggaatgtcacttaaatcgagcatttcccgcggtgcggtaaagatgatctcatccccgttccggtatgcgatccctgggatttctccaggtttcgatctttcctccgtgcttttaccctctcctgttctctgtgtttcctgtattttctgcttttctttgtctctccggcttttcccggcataatactccgccagctcacagaatgtcttttccccttccccgatcatcacaccggtgatctgcgggtgttctcttaaaaaactctccgtctcatacgaaacctccggacctcctacccagaccggcacttccggacgaagcttgtgaaattcttccgccagttcctccacaaatgcaatattccagatataacaggaaaacataagaacatccggcttcgccttgtagattccctctaaaatatcctccatctggttgttgatcgtatattccccgatctctactgtatcggaatcagccatgccttttgcgtaatgtgcggcatatgcacgcagattatacacggcaaggttggaatgtatatatttggcattgatcgccgtaagtaaaatcttcatctgttttctgcctccatttttttcattatagcgaagaaaaaaccttgttgcaacgtacaaaaaaatccggttccccgctgccagatttttacctgacagtgtgaaaccggattttcttttcttcatagattcgggtgtcaaaaggtggttttcaattttaggtctgtcaaattgcacaaaagcgtacaatctgttatctaccgcaaaatatgtcttacgataacgtctatccctgcaatccacagaagaattgctcccgcaatatatgcttttgtcttatgctcaaatccaaggtgatatccggtatagataccggtcacaacaaccgcgatcgtaagtcctgcgatcatcaggagcatgacaagaagatttgttcccagaaagccaaatgcaataccggtcagcagggtataaatgctggtaactgccgcaatcgccagtaactgtttccatccaagcttctgttcacagtgctctacaatgcgctcattttttatggcttttgcaaccagccgcactcccaggcagaaaaagatggctgctgcaatgacaaacccggtcactttttcattgtgcgttatggtgttacggtacaaaagtcctgacaggtagcttccgacgaacagcgctgccatctgccatgcagcaatcagtacgcacagtttgccaagctgtttcttatctatctttgctaccagcgatccctgacactccatggctgcaaatatatccagcgatatgcctgctatgatcagcagattctccaacgcattcatcttactcctcctaaagcggctctttagtcttcagcttttaccgcatctgttttaataataaatttaacgcttccgttcacaccatctgcgatatccgtataagtctgataatcggcaccggcatctaataccgcctggatacggtcgatcagcggctcgatatcgccattgtaggaattgatgatctcatcgattccgtcctcgctgaattccgtgattccgtctgcaagctgatgcgctccgtcagaaagttctccaacaccatccatgatcgcatcggtaccatcacttaaagtacctgcaccatcatttaacttctggttatttgaaacaagtgtggatgctccggttgcaagctggtctgtaccgctctttaactggtcagctccggtagaaagggatccggctttctcttttaactgtccgataccaccgtctaaggtatttaaaccatcggaaagatcagatgctcctttgtgcagtgtagatgctccgtctgccacttttccagctcccgttgcaagatctccggctcctttctttaacttggttgctccggttgcaaggtcagatgccccttttttcagagatccggctcccgttgcaagacttgcggctccggtctttaaggttccggctcccgttgcaaggtctgctgctccctgtgctacctgggcagaaccggctgctgctgcatctgctccagtggaaagctggcttgctccatcatatacattctgtgcacctgccgcaagctggcttgctcctgttgctaaagcagtaagctgctcctgcgtgtcctgccctgcaagctgtccggctacggtatcaatgacatttgctgctccctgtgcctgaccaatcgttgcaatcttatcggataaacttgcgattactgatgctgcatcaattgaattgctgattggaacattaagtttctgtgatacctgtgaaaaaatagcaatggcagtatccggttttgtaccctctacagctattccctgaatcagactctgctgaacttcctttaatgcattaatggtagcctgtgcattctcaagtgaggttcctttttcctgaagctgtgcttcaagccctgctttatttgttgcaagtgttgttcccatatcattcagtttaccaatcaatgtacttacgcctgcattaagactagcagctccgtcagacacttgttttgctccactgactaacgttttcatatttgttgcaatcgactgcactccatcattcagactgcttgctccactcgataacgtattagcaccatcggaaagagatgttgctccggcagataacgtatctgctccggtggagagatcacttgctccgcctgataaggtatttgctccggtagaaagatctttcacaccattggaaagtgtattcgctccggtagatacatccttggcacctttctttaaggttcctgctccgtcttttaaggaagatgctccttttgctgcacttgctgaaccatcttttaaggttcccacaccactgatcagtgttggtacacttcctgctaaggtatccacaccactctttaatgttccgattcctgtggataaagtagaagctccatccgtataatctttgataccgttctttaatgttccgacaccgtctttaaactcacccatcttggattttaaagtatctacaccgtctgcgagctcaccggaaccatcttttaactgatctgttgcatctgttaaagtatctaacatatcatcaacttcagaaagatctgcatctccgtctttgctgataaagtttgttgcattcatcacaactgtcattgtggtgcttaatgagaaattctccacatctgcagttacttccacgtaatccgggatcgatacatctccgtcaaaatcagaatcatccacatctaagctctcttttaatcccggaagtgcatatccgactacaatattatttttgccatcggagattactttaccattggtaacttttacattagaaaagctgtcatctaataccattccgctgatcgcagcaaatgggacatagatttcttcctcttttccgtcgatctttgtttttaccgtctcattgttggtgtaatcaaaacggatcgtcacttttcctgattttcctgcaagttcttccggctttacttccttaccatccaaagaataggtaattgtctgggataccggtgtctcttttgtggaggttccctgataataaatatcgttgccgtctgcctgccaggtcagtttgctgccatcctgtttgaatgtctcatcaccttttacattttcgatatcttttaaggtagaagcatcctcgatcgtatccttatttccatcattgatcagatgatcggaaacgatcactttgcgctcttttccggtgctgtctgcaagaacatataccgtttcttctttgccaatctctttctcgctgaatttgatactgtcatctaatgcatcttttaatttgctctcagcatcagaatcatctttttcgctgtctttttcggtgctctctgtactttcagtactctcctgtgctgtctttgctgcaaatacatttgccgtggaaactcctgttccgaccattccaacgactaacacacctgcaataatacggatcacatattttcttgtaaatcttttctttaattctggtaatttcatctttttttcctcctctattttactgaactgacgaatcttttttataacggaaacctgcacttgtcacacagattaatttatcaaataccataaacattgccggcaggataaatgctacgacaaccaaactgatcaatgcacctcttgcaagaagcatacataaggaactgatcatatcgatactggaatacattcctacaccaaatgttgctgcgaagaaacttaatgcactgacgatgacagactgtaaggaactgtctaatgcggttcttaccgcatcacgtttttctgctccgtggtttcttgctctcttatatttgtttgtcataagaattgcgtagtcaaccgttgcaccgagctggatcgttccgattacgatagaagcgataaacggaagaaccgttccggtataatgcgggatacccatgttgatgaaaatcgcaaactcaatgaccataacaaggatgaccggtaatgaaactgacttcagtacaaatgcgatgataatgaagatcagaataatggaaaccgcatttacggtattaaagtctgtattcgtgatggtgatcagatcctctgtacatggagcctcaccgattaacattgcagtgtcatcgtattttttaatgatatcacggattgcatcacactgtgcattcacttcatccgatcctgtcttgtactcggacattacatagatcatctgatattttccgttatccaacatttctttgatatcatccgggatcatatccttcggtacagtcggtcccataacggaatcaagtcccaatgccagtttgacaccgtctacatcagagatctcattttccatatttcttgcatctttggagtttagatcgctgcttgcaaggatcacatgagttgcacccatatcaaaatcattttccagtgcatttcctgcttttacactctctaagttgtccggaagagttcctaccagatcgtaatatacctgattgtggttctgtccgtagaaagcaggaccaatgatcactaaaaataaaataatgaaaatccagtaatgttttgtcacaaatccaccgatacgtccaagatccggtatgatggctttgtgccttgtcttttcaatccatttatccattgcaaggatcatggcaggaagaattgtaacacaaccgacaacaccaaatacaacaccttttgccataacaataccaagatccataccaagtgtaaatgtcatgaaacacattgcaaggaatccggcgatcgttgtaatggaacttccgactacggaagttaacgtctgtgagattgcatgggacatcgcacgtttcttgtcatccggataacgctcctgattttccaggtagctgtgccataagaaaatggaatagtccatcgtaactgcaagctgcaataccgctgcaagtgcctgtgtaacgaaggaaatctctccggcaataaagttcgttccaaggttgtatacgattgccataccgatactcaaaaggaaaataaacggtaacaggaaagaatccattgtaagtgcaagcaccagtgcggataatcctgctgcgatcacaacatacatgatgacctcactgttacagatctttttgatatcggtaacgactgcggacataccgctcaaaagacactgttcattggtcagtccccgtatctcctcgatggcatcaagtgtttcatctgctgacatggacgtgtcaaatgtaatgatcataagctggctgcctgtgtctgcattctgcagggaatcttttaaatcatccggcagcatatccatcgggattgagatatcagcgagtgcgccataccataaaacatctttcacatgatcgatctcttttagcttatcttctaactgtgaaatctctttttcctgcatgccgtctatgaccgccacggaaaaagcacctgttccaaactcatctaacaggatatcctgtcctttcatcgtctcaatatctcccgggagatatgagaggatatcgtaattgattcgcgtattcatgtagatgatcccggtcggtatcaataacagaaaactcaggatcagaatcggaatacggaatttcactacccattttccaaacttaatcatctttttcactctttctttctttttattttcctgtggcatacatttctccctgccacaatttcttttagtgtaaaaaaaaagactgaatctgaaaagattcaatctaatttttctgtagcatcttattatacaaattgcccaaaatgtatatcaaagttaacatttgattccgattgtatatttaattcacatattaaagttccgctaaaatatcttccatggatctctttatgatgtaatcatagatctctgctaactcccgcgctgagatcgtcatcccggaccgaatccagttcatgacaatatagcacatggactgtgcataatacgcagcaatacgttccggtgtcagccagacatactttggtttcttcgtggctgccgaacgttcaaacaccctcaggaacaccttcatgatacaggactgtgcaatgctctcaaacgagttctgtccctctaagtggatcgctttctgataaaactccttttctttttcaatgttggaaaataaaagtatcaatgcctcgtttaccataccgttctgtatcagaggttctgccggagcgatcagctgtgtatctatgatccactccaaaagttcatatttgtcctgaaaatggttataaaatgtcggccgtatcacgcctgccttatctgtaatctctttgatcgtaatcttctcgatcggctgttttaatgcaagttctttaaaactttctgccaaaagcgtatctatcgcgctctttccctgtccagtcatatctccctcaaagtatttttacataatcattcttcctatggtaacgctgcgaccttccggatcatcacggagattgagcatctcgcctgtctccacgatctgtaccagcggtctgagagaaaaa

SEQ ID NO: 5215 - DNA, 554 bp, Unknown
  gut microbiota DNA sequence
cagtcctatttcttcctttgcttttgcaaataaatacaaagagtaactttctccagcctttacggatataccgcagtaaccggtattagtcagagatccgtccttttcaaactgcatacgcagagctgcgtcccgatgttcattcagggtatccgtcagttccagttccatctttgcattgtgtgtataccatgccggtatttctgtctccggaatattgttgccctttacccagcggcataagccttctccgttgcaaaactcatccagccatccggatacggtttttacatggatgccatcctcctgctgtatataaccctccggtaaaacggaatcttcgaagcttctgtttcgaagcatttccggataaagtcctccgtctccggcacggttaatgtcttcaaaaaagattccgtataaatccctggctgtctcaaatcgtctttcctttgttttaatctttaacttgctcattgtagtctcctttttttacattccaagagttttgatcactacctgtcgaaagggttttcttgatctgttcttgtaaa

SEQ ID NO: 5216 - DNA, 839 bp, Unknown
  gut microbiota DNA sequence
cataccgtgaacgccggcgagacaaagaaggccttacaatatgagatggaagatatggagcaggcaataaaaacaggagatgtccataaattaaaaatttcagatacaaaggatgttatggatatcatgacagatctgcgaaaaaaatggaatatgaaatatccgggagaaagatgggaataaaacccaaaaaacggagccaggttttatgcaggctgtcagtcattgagatgtaaaacatcctttgattcctggatttcatgaataaaaaaatgaaatgtgaaaataatagttgacaaatcagtaaagatttagtatagttattcatgcgttacggcgcacgaacaatataatattgttaaataatgactttggagaagtactcaagtggccgaagaggtgcccctgctaagggtataggtcgggtgaccggcgcgagggttcaaatccctccttctccgcttattatttacaatatgagttgttcaattttttttgagaaagttgttgacaaatcgcacgagctattataatataaataagttgcgaaaataaaggattatgaattgtttgaaaaaacatgaaaattcaaaaaacaacaaatttaaaaaagttattgacaaacaaaacaacacatgataaaatatcaaagttgtcgcgtttgagataacggatcggacaaaaccgattgaaagaaattttcaaaaaatgaaaaaaagttcttgacaaaacagacttgataagatataataaacaagctgtcgccgagaacgacaacaaaacaaagaaccttgataactgaacagtgaaataaccttgaaagattcaatgaatttcag

SEQ ID NO: 5217 - DNA, 4159 bp, Unknown
  gut microbiota DNA sequence
ttaaatcgcagggaaaacaatggaatagtactgtagaaaaaaaggttaaacttgcggttgctaattcacttccaattactgcagatagagccttaaaccaatataaacgttcatcgatagatgcattagttgctgcactcgaaagattgttatagaacgaatatgaaatggttaagtggaagaggtgttattttcagcatagtttccaataaaaagtatcgaaggcaggataaactcttgcctttttctatactatgcaatagcataatagatgtaacagaatgtaaaaaaactaacagaaaggttggaagacatgaacatcgccgcatactgtcgtgtatccacagataaatccgatcagctcaatagcctcgaaacacaaaaagagttcttcttagaatataccaagcgcaccggggacaaccttattaaattgtatgcagatgaaggcatttccggaactaaaatcaagaatcgtaaggaatttcagcgcatgcttgcagatgcagaaaagggcttgttcgctatggtggtagtaaaggacatttcccggttcgccaggaacacggttgaccttttacaaagtgtccgcaaactgaaatctctcggtatcgagacacaattccttaccgccaacatgaccagtatgggaaacagcgaatttgtcttaaccattttcggcgcattagcccaggaggaaagtgccaacacttccaaacgtattaaatttggtaagaagatgaatgcagaaaaggggcgtgttcctaacattgtttttggctatgacaagacgataggtgattactttaatctttctatcaatgaaaatgaagcaaaagcaatccgtcagatttttcaatggtatacagaggaaggctatggtggatcgaagattgcgaatatgctcaatgaacgaggcatcaagaccaagcgtggcaacaactggagccagaacgctgtctgtcgaatcctgaccaatgagatatacacgggaaagattatcaatggcaaagaagagatcgcagattttctgactggtcagagaaaagaaaaggatgaatcagaatggcttgttacgattcgaccggaacttcggattattgaggatgaagtctttgataaagcacaggatatcttaaaaggccgtcatgattcttttaagattactcatgagcgacagagcaacaaatatttattctctacattgattaaatgcaaggagtgcgggtggtcttttcgcagaacggttcgtcaatacaagaatacttatgtgcgctgggtttgttccgggcataatgggaaaggtgcggatagctgtccgaatgcagtgacggtagacgaggaagaactgattcaggctctgcaggagtattttcaagagattcttagtaagaagaaaaaagtaatcaattatgtgattaaagaatttcagcgagtatacaaagcaaaagatgaaaatattgagtatgaaaagcagctaaatgcagaattgaacaaacttcgcaaatcccgtgaaaaatacatggacatgtatactgatgatttgatttccagagaggaattgaatgagaaaatcggtgggatgcgaaaagagattgaacggttggagaatgaactgaaaatggtctcttatcatctgacgaaaggagaacaactggaagcaattttgaacagtacattcaagcaactggaagatatcacagatgttcatgaaatgacaaatgcacagttgaaacgcctgatcaataaaattgaagtggacaaggatggcaatgtagatatttacctgcgtcttattggtgatttgggattggatgaaactgttttaattgaaggagataaaaacactgaggaaaaaggaactaaaaaggttccaaatagttacaaccatacataaagatgttacagaacgccttgtccaggtcaatccatcgcttgcagcggaggcacgcaaagtgttagatgtcaataaatccgagcgccatatccgtggtggacttgcaacaagggagaaatatctgcatcagcatgcataaaacgtaaaagcgtgtttattaaaacaaatgggcgtgtttcataaaacaacagtttattaaaacaaaaacgtgtttcatgaaacggaaaaatgtatttcaggagatggaaaaatacaatttacaaaattgcacaatgagttccatgaaatgcataaaaagtttgtgaaattaaaactattatgtgagttcgtggaatacgctataataatcacacgacgtgcagcagagaaagcgatcgcaaagattgctttctctgtttttttgtcggcaaaaataattattttatcaaaagaatgaggagagaaaaatatgccaaaaacaaagttacaggaagtcgtatttactattttaatggtgttcgtcatggtgtacgcaatgatctgctacaacattgcactgaacatgggaggaatgagcaacgttgtatttttaaatgcatttcatgaactgatcattatgggaccgcttgcgtttattcttgactttttcctctatggatcactgtccaaaaaacttgcatttcgtatcgtgacaccgggcgtggacaaaccgatcatgctgatccttgccatttcatcaatcacagtctgtctgatgtgtccgacaatgagcctggcagcaacacttttatttaaacatgcaggaaaagaagtgatcgcagtgtggcttcagacaacagcactgaatttcccaatggcatttttctggcagatcttttttgcaggtccgcttgtgagaactattttcggaatgatctttaaagaaaaagaagaacaggtcatgaaagaggaaagcgaatttttagagggcggaagtgtcagaaattaaaaagttattccatgtccggtattgggaaaaatcagcgcagcagcgcagtccgcgagaaataagagtatcagcacactgttgaagccacgtctgaagcctggcggcagggaaaaccagagttttcggaaaatttcagaaaacacgcagatccagagcatgccggcaacaccaaatccgactgctgacagaaggcagatatatccgtgaaaattaaaaggataactgctgtaatcccagtatcgtaaatcgaaaaagatatcaaggaaccatccgatcacaagttctaaagctgttccgagaagggcagtttttatgaatattgtgagcgggtggtattttgttttaaaaagaaaaagtcggtttgatttgtggagagacctgatggatatagtttctctggaagaatgaaacagacagtaaaatactaccgctccgatgccataaacggggagccagggaccataaaaaaatccgcggttgcgaaaagtattatcttttgcaatgaagataagggtttcccagagaaatccccaaaagcttccaagaaagaagaagtggatcagcagggaaactgcatcctgtatagagttctgctccggtgcgcagagttttgaaaaatccgggagattggaatgtcttttcatgtggatagtatgaccggagatggaaaggtatatgtatttttgttttacaattcatagattttaaaatatatcagattggtttttaaacagaaattctcaggtaagtgtcttttacaattaagtgatatttgagccacaagcatgtatttttttaataaaaatgacaaaataccgtaatgtagggaaaaacgccttgtaaactcctaaaacgtatcttataataagtatcattaaagcttgtatcagggaaggatatgcttttgaaaaaggcatcgtcatgaacagattgcaggcaacgaaaacatcaggaggaagaagatcaatggatcatgagaaagtaattgtcattgattttggcggtcagtacaaccagctggttgcgagacgtgtcagagaatgcaatgtttactgtgaaatatattcctacaagacggatatcgcgcagatcaaggcaatgaatccaaagggaatcattcttaccggcggtccgaacagctgctatgaagctgattcaccgacctgttcaaaagaattatttgaactcggcgtgccggttttaggactctgctatggtgcgcagttgatgatgcacgtacttggaggaaaggtggaaaaggcacctgtccgtgaatatggtaagaccgaggttat

SEQ ID NO: 5218 - DNA, 1135 bp, Unknown
  gut microbiota DNA sequence
accagcagccaaccgtcagtacaaagacaccgtattccgcatgttgttttcagagaaagagaaccttttatctttgtacaatgcagtaaccgggaatgcttatcagaacgcagatgatctgaaaatcgtcacgctggaaaatgcaatctacatggggatgaaaaacgacctggcgtttatgttagagacgaatatttatctctacgagcaccagtccacgttaaatcctaacataccgctgcgggatctgatttacataggaatcgaatatcagcagtatgttgatgataagtccttgtattcgtcccggttgcagaagataccggcaccgaaatttatggtattttataatggaacggatgcagtggatgaccgggtagagcttcgcctttcaaacgcttatgagcatctggctggtgagccggatctggagttaaaagtcctgatgttaaatgtcaatgaaggacataacaaagagctgatggagcagtgtcagacattgaaggaatatgccatttatgtagcgagagtccgcaaatatacatcagaaatgaacttaaacgatgcagttgcacgggcaatcgatgaatgtatcaaagaaggaattttggtggaatttcttcggaagaatcgttcggaggtaaagatggtgagtatattggaatatgataaagagtgggaagagaagaaactccgaaaggcagagtatgaggctggcagaagcgaaggcattgaaattggcaaaagtgaaggtattgaaatcggtaaaagtgaaggcattgagattggcaaaagcaaaggcattgaaatcggcagagataaagccatggcagaatttgtatgcaatatgattaagtatggcttctcaatagaaaaaattgcagaagtaactggaaaaaatgcagagcagatccagactatattaaatcaacaagcaccgtaatcgtgaaacaggagaaaatcttttgggtgaagattttctcctgtttcagtctaggcactgtctttctttaaaaatcggacttcttttttgtgcagactgcacaagaaatttcaaatcagttgcatacgaagaatgacgtatgctaagataaatcaaagcatatttctaccatgtgaacagcgttattcagac

SEQ ID NO: 5219 - DNA, 1878 bp, Unknown
  gut microbiota DNA sequence
aatcttttttgcgaacgattcggaagtaatattctcgtcccctctacggggtctcttatctcaatcctgtcccctacacctcccaaaacacaaggcttttatcccccatttgcggggcaaacccgcaaatgagagaaatctcaatatcaaactggtgtataacattctcaaagcctgattttaagcctatcggagcaaaatcattatatttcctcaaattcaatcctccccatccccatatgatacagctttccctgatactttgtacatttacagacatgcggtgccagtttaagctacaggtctttggtatgtttatgcacaacataatttctgcccagtgtatttataatatatcttttgtcatattaccctataataatcacttcttcatttttaatttcaggacttgccccaaaaagattaacctctccgtatcctcttattttgtaaactcttacgctgtccgatctacggtcaatcagctctggaatatcatgtaacagacgtcgatataaattttccgtaatcatcgcctcaaatgccgatttctgaacccgaaaaccatatccattcattttcttcgcaaacctgactcttcgcttattatcaacaatatcataaatcacgagaatatacagcttctttatgctattttcttcctcagtattccaaaaataattttccatttgtctttccccccacatttatcaaaccaattaccgaatgatcaccggcatatattcattcacattttccgtttcaattgcctttacaaactgattaacctgaagatccattgcacgccggaagctgacactgtaatcaatatacgaaaggtatctgttctctgtacgaaattttccctctaacttctgaatatatttccggaatccatccttttctaaaaagactccaggctgatcgattccagtatagaaatcttcttttaccaattcatgtccatttaacatactaagcgctgttgtgtcaattaatacggctctccattcttccatcagatcacttgctaaggtaggatgcttttctctgtctttatgcatcactccaaaatatggatttaatccttttccctcaatctttccatataattcatttaagataatcgagtagccaagactgatcagcgaattaaacgggtccatcggaggacgtcttgacctgccttcaaaaacaaattgttcatcaattaacttccccaatactttaaaatatatttttgctgccgttccctcatatcccataacctgttccacactcttcgcatatggcagttttttctgcatattctgcatctcaatgatcattctatgaatatcttcatctctgcctcgcgcatatctgcgcaaaacaacaacctgattgcggatctttgcatcaatgattctttttgacatttccagtttaaatgtttcattgtgtccaatttccgcctgaatacgctgtctttgcacattcacatgggaagttgagatcagccttccataatacgccccgcttgtggaataaaacaggatattcactccccgttttaaacattccgtcaggcagcgtgtcgtaatctggacactgccaaatacttcgatcatctctaacgtctctgctggaatactttttatcattccatccttgtactttacctgaaaacggtttgcttctatcccgatactcgcaccctgttcactgacataaagataactcatgtgtttcctcccttgtttttatttgtccccttactgaagattttttcaattatacttgtgtaagtatataacaaaaacagctaaaggttctcgtcccctccacggggttcttatatttcaatcataaagaaaaataataaataaggaggaataa

SEQ ID NO: 5220 - DNA, 2189 bp, Unknown
  gut microbiota DNA sequence
cgtgttcagtaaatggatagacctcaatgaaaaaacgaatgtctccacagaccgcaaggcaacatcggacatggtaaatgataatacctatgcttatgaaagacagatgcctgcttataacctgacgctgacacttaccggcatcggggagccttatgaagtccgttattacataaacgcaccaagggcattgacgagtacggatgtgtggaaagtcggtaatacatttacattgatcggaaatagtgatgcagagacagcgacaaagagttataccggaacacagatcaacagtatctgtaaaaataacacaccgtatatctataaaacataccgttacggcacctattataatgctgcattgtcaagcagtatcacgatcaacggataccgaaaagtgataagcggaacccatacgaaagccggatggtggactgcagcaagcggcggaacctatgtaaatgtggacggtgcagcatccggagataatcagggcaagatctgtgccagtgactggcggggctatgcaaagagcggtaccttatccaatggaaaaaaaggaaagatcatttccctgtatgcacactgggaactggatcaggcagaatataccgtccgccactggaaacagaaagcagacggtattgcatcaacccatgacgataaaaactatgaacttgccgaaacagagacgaaaaaagcacagatcggaagtagaataacgcctgcagtaaagacatacaccggttttgacagcccgaaaacacagacgaaagcggtaactgcagatggaaagatggtcattgattattattatgaaagacatctatataatgtaacattaaatgccggaaccggcattgaaaagacgaccggaggcggatcgtaccgctatggacagagcgttaccatcgatgcggcagtaaaagaaggctatcactggttaaactggaaaggaaattataaaggcggatccggtggggagcagaccgtggatgctaagaagtttgtatttacgatgccagccggaaacgttacaatgacagccaatgcagaggcaaatagatatacaatccattttgatccaaacggcggagccggacatatcgatgatatcgaaaccacgtatgataccgatgtgacactgccggatgtatggaatgcagacggaacagcagcctatgtgaaatatacactggatggacaaaacgtgacagaggatgtgattgccggagtgattccaaaggcaatgatggatggatatgaagaggaagaaacggaagatatggaggataccgaagatccggaggatgtcgaagagacagaagtgacagatgatctggatgacttagaggaagaagacaacgaggaaaataagaaagccgaggagccaaagaaaaaagtctacacatctgtatttatgggatggtccttagaagatggcaaagacacctttatcccacagtggaaagccggggatattgctcggaaccttgtggcagaagatggtggagagatcacactttatgctgtctgggacgactgtccgtggatccaggcacaggatctctattataccttagagcaggcacagagtggttttatcacagaagaagaaatcttaagccatgcaacggcgaccgaccgggaagatggaagtccgattttaccgggaaccaatccggcaccgagtgatccagaggtttttacatcttttacaattccagattatcaggcgggcgaatttaccagtctgcagcatgattttgccacatccgagaatttaaccgtggtagaccatgtaggaaacacatatgtgaaacagatcatggtgcatgtgaccgataccacaccggtgaaagtaaaaccggaaggaaagaccaggtttatcagtgaaaaatattttaatctggatcatgaacatggcggattggaagaaaattctatctggatgacagatgcggattatcactctgcactgcagaaagcatttgataatttgaaaaacgacacgccggaagatgagtttttgatcccgcatgaaacgattcttgaaatgaaacaatatgtccaggagcacgggatcggaaacagtaaagagcctggagcattgacagagttttataatcggttcatggcgccgaataaagtagaataattgcgacgtcgcaacaaaaatttgaaaggga

SEQ ID NO: 5221 - DNA, 2083 bp, Unknown
  gut microbiota DNA sequence
gttataatatcatcataaacttacgaagtcaacactatttttgatattttttaaagtaaatcaataagcggtttttcgataaattgtgtgaattttatcttcaatttattcaattttgtttttacttgcattatttccatttattgtaatgatatcaaggagctgtttgtggcttaaaaaggtgtcagaatttaacctgacaccttaagcacagccctagttgaatttatcaggctgtatatatccatccggacttgtagcatatccattttggtacttaacggtaatatactgtgtttgtccatccgcctttaactgcacaaaacaaaccccatcctcaaacttatctgtaatctccattttctgatttaaataataaacccaaaccgttccatcttcttcatactcaacttccggcatattgatttcatccagcagttcatcagcagtcaatggtctttctgtgccgttctcgtatgcgacacctccaccgccctggctgacgtcatttccatctgcatctttatagtcaagggtatagttcccattctctacgttaaatattgcatctgtctgatctccgtgaatccacacctgcacaattctctggatgccgccaacatccattgcatatgccgcacttccagatccagctgcaagtaccactgctgctattgctgcagctgctttcggtgtaaaacgtttctttttcattggaacgacctgttcttttgctgtcattttcagcacctccgtcaatacgtccggagaagcatgcagcttatcaaatgtcttttgaaatttttcttcatctatcatatttttactcctccttcagataattttttaattttgcctttgcgcgaaatagtctggtactgaccgttttttccggtatttttaatattgatgcgatttctgccgtggaatatctttcataataaaataacagaaccggcactctgtatttcttatcaagctccatcactgcctgaaacagatctaaataactttcctcttcgaatccaagtgtttccgcgtattccccgatatcctctatcttacgccatgggggccggaacagcattttgcattgattgacggtgactctgatcaaccagttttcaaatgggaatctgattcaaattccttaagttataatttctttcccttgctcaaggatatatggtatcaattccaaaggatatacctttgtacctttctttaaatcttctaatggaacccaacagaaatccaaatcaattctttcattatccagctcatcctatcacaatcctttacaaataaaaaagttttgtatagtcaaaacaagtcaaaccgtagtacacatactaccatttgacttgtctattatcttaggatatctactttacaacgattatttccactctatgatcgtttctatttcttcctctctgctatagatatagttctccggaacagtggcaagcaattctattctgtccatttttatttagaaaatttcatttttattagtacaccagatttcaatgtttttgacacaaagatggaagcaatcccctaggatggatgaactctgtccagtatagactccattttttagttgcataaaaaacgagacggccgaagccgtttcaataaaagtctagcttttggggatttcctcatgataaggagttgtggatttatgttaattattcaaactcttcccaagggaagtatcatcaaatcaaaaatgctgattttatgcggcattccaccgcatctatttcatcaaatgttactcttttcatatcatttttaaaaactttagtagcaaattagttgcaattattccctgttgcttctatgaaatccatggcagatataatctacttttactactaaaaacgaataatcaaatgtggcttgcgggtgcttaactgtgcctgctgccacacccactatgaaaggagcttttctatgagcaatcaacataaacatccaactataagttttagaatcagcgatgctgaacgcaaacaaatcgaagcccgcatccttgccagtggcatgatgaaaaaagattactttgtccgtt

SEQ ID NO: 5222 - DNA, 2748 bp, Unknown
  gut microbiota DNA sequence
ccagactgcataataagctgcatcctgtgtcatcgtcatattctgatccagagcatttccctctgcatctgcccatcctgtaaatgtttttccttctaccaccggatctttaggaaccggaaccatatcatctgcatgaactgtatagcacttataacattctgtatctgtgttcgtcagataataacttatctggtatgtctccaaaacttcttcctgaagtttatttacaaccgctgtcctgtcatatgacacggttcccggttttccattcgggtgtttaaattcctctgtcacacttacggataacaactgcttctctttatccgctgcatttacttttaaccggatatctgaatctgaatccagtgtatccgcaagtgtttctaaaaaatcagcttccagctgattcttatctgtgacattatacttttttgttaacagattttctgccgtctcttctgcagcagacggtagattgctttttaattccatgctcctgttcatcctccctgacaccgccatgatcgttaaaaagatcactccggcaatacaggttgtgacaatcgccctgatgattaatttcatttgtgcccctttctacatgaccggaacatggatcactacggttgttttccgattaccggagtccactgcttttaccgtaaaagaatacattccggcagatgaaaatgtgatcgttccggatgcctgatccatctggtctgtcagttcgtttccatctttatcacaaaactttaaaagttttaccgcaagctcctgtccgttatagtcatgtgcttttacataatctgctacattcactgttcccggtgcaaggctgccgcttccctggtactcaattaccggcgcatctattgcgatttctgtctgatacgcaccatagtctacataagcattgtaatccgtcccatccgtattcatatgcgctgctatgatctttacgattccacggtttccatccgaatctgttactgcagaaaatatgatcgtaaggatgcatatcgttaccgcaacagtgaccagcagaccgccgtgttctttcatgatctctttcatgtcattctcctaaccacacaaaccgttaaaaaatgtctctatcatctgtttaaaatatccggcatatacaccatatgccatggcaagtgctatgacggataccgctccggcctgtatgcttcctccaagttcttttacaatctcttccatttcatacaccatccttaaaatgctgttgcagccatatatacgctgatcataaacgtgagaactgccaacgccggaaccgactctaagatcatttcaccaatctgttctataaactcttccattaccgtgcaatcccccttgtcatatgcgttttctcaatgccaaaaaccggcatcttataatcataagacagtatcacatctgccgataccgtctccccatccgcattcgcagaaggcgttacggtcagtgtataccctgctgactgcgcctgcgaaatacaactgcttatcacatcccggttaaaatcactgttttcaatttctgctatcacatccgctttgtattcctttgccgctgccgtctgtgctgatgcagtcaataatgcggctgcaccaaatacacagagcagataaaagaaaagcgttgtaaatgcactgattatatttttcatctacattcctcctgcctctgacagcatttcaaataaaaacatcatgccaacgaccagatctcccagcagcttgatggatgcaccaaaaaccggatacgaatataacatcttaacctggaaagccgaacttttattccggcgttctgcagcacggtttctcatttcctggacctgtactaaaaggttctggatctgcacctttgcatctccggtaccggattctgaaatcgcatacagcattttcatgcagctggttgtttccgggatatcgaaatttttacagaaatctgtgtaggaactcaatgctttcggctgctctttcaaacgctgcagtaatgcatttatttccggaaccaggatctttggtgcgccatctaatgattttgcaattgaaacctgcacattgctgtgctgcattaataatgccatctgcatcagccactctgggaatgccgcataaagttcttcggataccacacgtcttgcaatattcctgccaaatctatgctgctgcaacatggctttttcatagcagcgcagcacatattcttcgtccctgccgctttcttcttttaaccagttcctggtcaatgtcttttctgatcttgcatatacatagatcatccataaaagaagtccaaaagatgtgacctgtaccagacctgttgtaagcacattgtaaggggcttccatgttaaggatacccggaagtgcatttaacacatataaagttccggcacataaggctgtagccacaacaatggataccacattgtttgtatgtgcttttttcttttctccctgaagcagatatccacgacgcttccataattccacatcgtttaataacagggaaatggaatcatccgcctctccaccatattcctctgcactgatcaaaagttcatgcagtgtttttatcttgcggcactcgtattctttttccacaatgtctaaggattcccttaaaacacctttttcactgtaggaacatcctgcttccagatgaccgattgcttcctctatcacatcctgcatatgccccggttcaaatgtttctttcg

SEQ ID NO: 5223 - DNA, 1454 bp, Unknown
  gut microbiota DNA sequence
tctttttataggtatccagaataaatgccggaagtgccaaaaacatggcgatcagcacaatgacaagcagctcccatttcagttgaaacagtaagccgatcactcccatcccggcaatacatacaccaatgacaaataaatgcgttttccaggaaaaatgatatccgtatgtataaacctcttttgcaaggtttcccggatttaaaagcagcagattttttgccacacggttttcttttttgatctgctttctctcttttatctgtgtctttttcaaacctgtcactatctgccctccttccggtatctgtaaaaactttcacaaaagaacggttcttgtattccagcacgttctaatttcaaaagaatatctttcggtatctcctctgaaacaagttccccatcctctaccagcatataaattctgttttcatgatcttccctggcataaaaacaaagctgatctaaatatcttctgatctctccatcctgtgtattttctttccggatcagaagtccaagatttacataacggtaaatcctgttttccatacgtctcgcatcatttacattattcatcatgctctggatacggtctggcagcttcctcacatcatccagatggatcgttgtaaatccattgacaccggtactccactgttctaacagtgatgtcacttccattgaccttgcctctgataaaaccagataagccggattctgtcttaaacacgccttgattgcatccgtataggaaaaattatcctttacacgaagctctacggcatccgctccggcattaatttccggataatggatttctaaagaatcctcgatcgtgatcacacggctttctttcggaataaactgcataaaaaactttgctgtttccgtttttccagctccgggttccccgccaaatacaaagttcatacccgccctcacacaatttaaaagcagatgcagaaccttttcttcacaaaaaccgctgtttaacatcccgttaatcgtattacgcaccagacacggagatctgcggatacagacgcttgtcccggttgccgccacagaatcatggatgatactgatacgaagttctttcgtatctgcctctaacaccttatttgcattgttaaactgtgcatccacacaatttgcaatgttatgtgtaaaggcatctaaaaagttttctgtaactttttcttccgcttcttttgctctgtacttaccctttttaagatccgtgatccacagggcagaaccgttataatccacatccgtaacatccggctgcattaaaaaatcccagaacacaccaaactgttccgggcttggttcaaacatttcactcaaatttaattttccctccttttaaaaggtacaggcagcatgtaaatgtcaaagaccaaccgaacatttgctgccgcctgtttttactccagccactttactta

SEQ ID NO: 5224 - DNA, 94914 bp, Unknown
  gut microbiota DNA sequence
agaccatatggggagatcggtgaaagtgcatccttttccgtaattggaagctgcttcggattgccgtagacacctgcactcgaaaagaagatgatcttcggtcttttttcaaatgactgcaatgctaaaagcagctgatataaactgtgcagatttccgtctaagtccgccatcggatttacaatcgatgctccgacatttgcactgccggcacagtgtaagatcacatccggctgtgctccggtaaatatattggcgagttcctgcgagtcctttgacatattacactgatagtagtggatctctgctctatcctcgcagtaacggtcggctagatcaatgccggtaatctcgtaatctttgctgaaatattccatggcgcatcttccgataaaaccatttacgccggtgatgatcatttttttcatggacaaacctcctataaaaacactctctcaagtgccctcgaatactctctcgcctcgtggtacatatttgcgattccctgttccatgtcgccggcatattcagcttcatgctctggcagggatgcgcgcgctgcagtgcgcgcgatcgtttcggcaagctgtttcggatcatgtggatcaaaaagaacacattttttgttctgctgttcctgatgtaccgggatgtttgacaaaagtataactttatcaagtacttttgcatcctctaagaccgtcccccatccctcacagagtgatggctgtacgataaactgtgcattcttcatgatcgcaagctgctcggtacgctccacaaatcctaacaattttatattagcacaaactgcatctgattccatgatctttctcaatttatcgatatattccgggttacggtaatctttcagattgccggtaaatacaaaatcataatcacagagtctgccctcttttaacagacattcaattgcttctaccataacgatatgatttttatgctgccagaactggtttggaatatagatatagtttctctttaagtcaaatttgtcacggacgctctgctctaattccggtgtgatggcgcacacttccggttcgatgtaagatacaaaatgaaccacctcaaccgagcatcggtgtcccggatagaaacgctctaaatctctcgccgcatcaaaactgcttaaaaccattggattatcgcttcctgtcatggcaagatcatttttctctttgtgagccagttcctctgcaccgaaaaattccggcagggttctgtgctggaaatccgggatccagaaaatccccttctttttaaagagttttccgatcttattgagttctaaggcatagcagtattttaccccgccaaaccagatcagacgcatctcataaagtgccagttttattttattatttccatcatagacacgaatatctacatttacattttctttaaaacagtcaaaaatatcggcatgttccggatcgatcaaaagcaccagtgaaaaacgttccatgatattttcgttctgcaggcagctgaacataatgttcttaatataataaagtccgccgatccatcctctgtttccaagtccgttaaataaaatcttttttttcatattattcctcatttttgagcaacttattgcgaagaggcgacgagaatctcaaattctcgtctgccatcaaagctatttgtttttatttagaaacaaatagccgtgcaaaaaataagctatcgagcttatttttcgcactaatcctttatttctgtgataatacatacgaaagtgccgcaatacaaccttttgaaacctgttcaaaagaaaattcatgtgccttttcgtaactctttttccccatgacagatgccatatccccggcggcagccttttggattgcctccgcaaaaccatccacatcttccgggtcaatgatatagccgttttcaccatctgagacgagatctcttgcaccatctgcatattttgatgaaatgattggaagagatgcacacattgcctctaaaagaacaagtccaaagcagtcctccctggtcggaagcacaaaagcatccgctgtgcggtataatttctgcaatggctccccttcctggtatcctaaaaattccacgcggtcagaaatcttaagttctgtgcactgtttttgcagcagatctttttcctgcccctcaccgacgatccagagccttatatcctgcggtgtttttgcaagtgccggcagtaacagatcaagtcctttccgctggatcaggcttcccacatacagaagctgcaatccctcattttgggttgttttctgtggtttctcatacagatatttctgaatatccacggtaagatatgagataaagcatttcttttcatcagcaccgtaagcgatctgtgcctcacgcgatgcagtgctgctcgcgataaatgccgccgctctttttataatatagcttctcgataagcgctgtacttttccgatatttttctcggaatttaaagtgccgtccgtccagctgataaacgggatcttctttttccggcaccaatgtaccgcacgaaggatcgtcgggttgtactccatggcaaagaccacatccggcgcgatctcatttaaagtcttttccacacctaccgggataaacacatatcggtcatcaaaccgtttgcggatgatgatcgtctttgatttcaggaaatgataatgttcgatctcctccatctcaacactccatttccggttttccatgcctgcactggaaaaaatgatatgaaactcatattccggaaagtttttctgcatataagaaaagaaatccacccggtatggcgatggtatattcgtgataaatactgccttttttttcattgttctttttcctctgaaatgctgtggtagatactgatgagtttctgatagttatcttccggtcttaaccggtgctgataaaattctctcgcattttcctttaatctgtttagatccatctgttcaaactcacagacttttctggcaagatcctcaatagagttatactcaaattttacacccgtcacaccttcctgcaccataccatccatattgccgacacgtcctgcgatcaccggtacgccataggaatatgcctccgcgatcgtcatggcaaacgcctcataacactgggaagtcatgatgactgcctttgcattataaaatttctcggtcatctcctctttctgcaggtaacctaaaaagcggacatttttcatattatgggtgctgacgtatgcctgcatctcgtccatcatcggtcctgttcccgcaacataaagaatcttatccggcaatttttcaaaagcttttactgcaatgtcaattccctttaatgcctccactcttccggcgaacagataatattcttcctcaggctgttttttaaccgggacgattccatctgcaaaggtaaagtttggtttgatgtaaacacgtttcggatccacgatctttttgcccggatctaaggagcttaacagtttatttttgttaaattccgtcagacagataaaattcacacgatagtaggttccaagaaaacggtgaatccagaggattgcagagcttaccatcgtctgtattttacttccgcggtaacatttgtgccggattgcacattttaatccgccatccacacattcctcacagatcacattgttgcggaaaaatgatccggccggacagagcatgcggaaattatgaagtgtctggaccaccggcaccttacactgaaatgccgcataaaatacagatggactcaccatcatcagggtattgtgcacatgcacgatatcgattttattttcacggataatcttttttacttccctgcaggtttttaacgaatagactgccgtaaaaggaataaaaagtttttttaatttattcccctcgttcagttctttgttactgcgatagtaagtaaagacttcatgtccatgctcctctaacagctttttctcattgcgcaccacgacgtcttccccgcccgggatctgataaaaattatgaatttgaagaattcgatatttttccattgtctcctccatctgagatctcatttaacatcgtcggatatagcaatacacctgcaagcaaaataaacggattcataaaaccatttaagacaaactgttccatgatcccatacaatgcaaatacggaaagcatgactaattctttatatccccctgctttatagagtctgactaacgtaacgcagagtgccacaaaaaatgcgattgcaaaaatccatccgcagtacagtaaaatatacatatatgcgttatcgatcagcccatgataacttgcataaaaatactcctggtttctcggaagcagcgcaagcccttggtcatgataatattttccaaggatatatacccttcctgatacatagcggtcgatcgtcttcataatgtcattgtcactgttaaatagaatcatcataacaaaactgaaaattgctccaaccggtatagacagtgcataaataaacttcacttttttatttttgaccagtttttcaaacagaatgatcccccacgcaaaaaagaatacaataatcccggtacggcaaaatgttattttataaaaaataaacgctgtcaggcatgttccgaaaaaccaccatatatttaatttttcatagaaataatagagcataagcataagaagcagaaaaattgtcatatatgcagcattcggttcactaaaaccaagactgtacaccggtacttccacatactgtgcatttggcactgtcttataaccaatatcaaacaacccataagcggatccggctaccataataaatgctacaaaaagtctggtccatacagagatttcaatcaatttccggaaacacacatccttgattccgatgatcgttaaaaacaaaaacagtatcgtcgcctttttggtcattacccatatgaaaagacctgcacctagcatcagcgcgatcacaacgatctcccgcagcgtatatctggttgtaacaagtttcattcccaaaaggatcacgccggaaagcataaaaaatttgtagatctgatcactactgtcataaccaaatgcttttaccagcacattgaccgcaaagtatccataatacgcaatgatccccatgctcttccagtcattttcccgtatccattttctgatctgctccatctattcctctccaagcatataaatgacataatctccggtttccctgtaatagtgatatccatacggcttcatatcatccggtatttcctgttctgtacggttaaaacataaaaatactacctgattgcgctttgcaatatccgtcactactgtcatgtccggtttttcctgacacatctgctgatacattgcgacttcatcatccccgatcccggaaataaatccgcccacgtttcttccataaaataatccgatatcacagcggtactgtctgatatagcagagcagttcattcggtacaaccgatcttactttccagctgacacctgcgcctgctaaaatatccgcaacatccagcgcagcctgcggcagtttatattcattttctgcctccgtaaaggttgctttactgtaaattttctgtccgcttaatgcgatcgtaccaagggccgccacaagcacaacgatacggactgcctgttttttccaccggcacaccagccagaccaccacatacgcagccgtgaaagaaaccggaagcatccagaacagtctccagtacacaccggcaaagaaacggcttcccacataacggtaaaataatggattaaataaaaataacagtaccaggattgtcggccataccagaaaccggacggtctgtttctcttcctgatattttcttcccaggaaaaacagcattacaactgcaaggcaaaacaggcaccagtgaaaaagtccggtacgtccgccaataaaatttttaaaattgtccagtattgaataaaaatctgctgccatatccgttctctttcctttttaaatccccgccgtataataaatcatataaacagcacacggcagtgctgcgatccatatacagagcatacgtttcagattccggtggtaaataccatctaaaagtccgtacaatcccatcataactggtgccataataattcccattcccgataaaagagctgccgcaaaacttaaggcatacaatggtgccgcccatttcatactctgtttttcactcataaagatctgataaaacaaatacattaacaatggaaggataaatcccgccacgattgcctttccctgccagatccgcaataaaaacatcgccgacagtgtatgtgttgatgtaaaattccagatatggaacacagataaaacaatcagaaacagtgctgttttttccgcatcaccgcgaaacagtacatttccgatcattccatacaacacataacagatgatgatcataaaaaatggaaaaaatgtatgtgaaaacaccgccggagcaattcctgttattttacagcacattgccacatacatcgtccatggggatgtcacatcttttcttacttccccgacatcccagtacatatattcatccgtgatcggatcatccactaaaagcgtatcatgcacaaccgcagaaacttcttccgaaacatatcttgcatcgtcatcatcaatatgctggtaatgatacggaatccatgcctgcaaaaggatcagcgccgctgcaagaattccaaaaatgattttccatgctccgactttcttttttttgttttccagcttattttctactgtaactaagataccacatctgcgtatcagaattaccatgataacaatggaaacaatcaccagaaatatcttccaaagtgtgacagcctcggtaagcgtccttttgccaagtatcattggcaccagcaaaatctgtcccgatgcaaacatgcttgcaagtccaagcacccatgcgttgcacagttttctgaccgttccctctattttcagataccatacccacaacaatccaaaccagaccggaagtactacgaaaagcattcctgtataaagtagattcttataaatcatataccagcactccatccagatggatatggttgatctcagccgtattctttaacatataaagttcttccgttctgacatttctgcgtccgcagatgacaagattactgtcgcaaagcaatgccgtctgatatccttcggatattgccgacacatcccttccattgaccagaatgtattcatactgctttgagaagcgatccagaagctctttgaacttttcatttccaacaagatcaaatccctgttcctgtttcaaatttctctttacggtgtctaagtagtcattcatctgctgtaactttaattctgtcgtattccccataacataggcacttaaagatgcatcatcactgtcagttgcattcaggtcgatcagcagagtctttttcttttcatttgcatagcacatcgcaagacgcaatgctgtggtatccgcagttcttccgaccggcagacagttaatcttaaggcatccttctgctttttgtccattcaaaaacatagccgcttttttataggtttcttcatcttcattcttttttgtgatcacatcaacgatctgtgtctctaaacattcctgcacttcctgtgcatccttcggttttttataaatcatcatccacaatgtatataaaacaacctcaagcataatgccaagtaaaatacctgcgatcactgcttttaatactccctggcggaactcagaactggagatggtataagtttcaagctttgtcacttctctctgggactgcggttcatcaaatacagtaaaacactgtgtgccgacctgtttctttgtcacggtatccaatgcctgaagaagtccgttcacaaaagcatacgcttcctcttcgtcatttacggtataatcccagctcgttctcggatacaccacataaaaagtaataatgtccgatgcctctgtctgttcacactcaaacatatccgtaaatgcctgttttgtcagatcgattcctgtcactttacagaattcgtcgtacacactgctgctctttgcaattttcataatatcattgccacgctccacagtacttccggaattataatcttttaaaagcaccgaagtctccacctgcattctgtcatcatagacttctgcatcaatatatggcatcagggtttttgccttgtatccaccgacgatcactgcaaaaactgccgcaaagacagccgcaagccaccattttcttaagttatactgcagcacatccatcaaactgtattcttttctgctctcatatctctgattcatatcaggtctcctttctattctccgcctttttcaaacaccacttttatcgtctttaaaatgatcttgatatccagtcccagactccagttatcaatatactgtacatccagtttcacgacatcctcaaaatcagtaatctcgttccgtccgcttacctgccataatccggtaatgcccggttttgcacttaaacggcgtttctggtgtgattcatactgtttgaactcatctaccgtcggtggtcttgtaccaaccagactcatatcacctttcaaaacgttgaaaaactgtggaagctcatcgatactggtcttacggataaattttccaaccttcgtaatacgcgggtcatctttcattttaaacatcagaccattcatctcattctggctttccagttcttttttgcgttcctctgcatccttatacatcgaacggaacttatagatcttaaaaaatcttccattcttgccgacacgcttctgtgcgaaaaacagaggtcccggagattcgatcaaaagcggcggtgctaaaaagaccgtcacaactgccgtgatcacaagtcccacgatcgaacctgcgatgtccatcacacgcttgatcataagcattttccagtcataggactgattggaaaatgtgacgaccggtatatttcccagcatgttaaaagttttatggtaatcatcaaacttgtttaagatctcaatcgtgacatgtacggttgcccccatatcctcaaaacggttgaccacctccgcaagcgaatctcctgtctcatacggcacactgataaaaacttcatccacaatctgttcttttacatactggaacatattatcataagtggcaacgacaggaacaccatgataccattttccaatctggttttcatcaatgatcgcaatacttgcaagacgatggatccagtctccagaatggtctgcatccgcgatcacctcttccacacgttctgccgttgtgaccagaaatacctgattatttgctcttttgttacggtaaacatgcagcagataatatttaatgataatatgcatgccaaaatacaggcacatatttaccagcgcaatacaaaaataaacacctcgggaagcctccgcattattgtgctgtaaaaaaatggtcagcgctgtcacacatactaacacaacgctcgctttgattgctgcccacaactcctgaaatacacttcggtcaataaaacgattatcaatatccgaaaagagcattaccagcatgtaaacaaccattacgatgccaaagctctccatcagctctatcttcatatttgcgacggatacatttcgataacccaccagccacagataaccgcccccgaaataacttacggcaaagcatatcagatccgccagcagtaaaatgatactctgaattttttctcttgtctggtacatgtcaagtcctttcctgtttcttttccccggtttcatgcccaggtggcactgtttcttcctgtcatttattctggtaataatattccgcactgcgttttcccaacgaaaaaatcagtttccattccgtttcgcgcggaacaataaacacacagtcaaatcccaggttcaggttcacatcgcacgtccggcgcagttttaatgcatcggcgacatccgctctcggatatcttttcaattccgctgtgaccacagtgccgtccggcatcactgcttttatatcaactggaagtacctttccattccatgtccttgcaagtgcccatccacaacagaccacactgccatcctgatattcctgtctgtcaatgtgatacagaatcttccgcactctaaaaggtacattctgcatttcttctatctgtacattccctgcatcctgccttagcagctgctctaagggaacgatctttgttcccatcacacgctgcatattgcgcaccggaacgctgccctttcccagatatgcctgaaaattctcctccatcctgccaaactgttcttttaattccttactgattccgtaagctgctaacagctcatccagcggagtgccttttcctcccatgatctggtaatatgcaaaataaagtgcacggtataatacaaataactttggtaccggaaagaaaaacgtccactcataatcaatgactgtccattctgcttcctctattttcatctcactgcctgcaggaatcaaaatattggcaaatatcatatcgatatcgcatatatccaccgcttcagtttcctctgtaaaatgaacctctccaaacacttttcggaaatcttcggttggcgtaaacagatgttttccaccatattccatgatacgttttgcataatcatcaaggatgcgcttcaccagttccgtctgatttctttcaatcgcccactccatcacatcctgcagtgtgacaccgggatcaaaaccggatacggctgcatcattttttgtatgacaggcgcagaatctgattttctcattactgtccgcatagcacgatgacaatttttcgtatgacttctccatatgacagatatgctctcttccttccggataaagtgcatattttctgacacttttttctccatccgctttcttgcagatatccgtgcggatggcaaactgccttgccctctcattggaatattttgaataaatcacacgctgttctccggtcctatttcctgcctcgatcaaaaaggaattggcaagttctccaaataacccttctgccagaaccgtatcaaaaacttttttttcatcaaaaagctgtaatctgtccctgtcaaaatttctccggttgtcggaaagttctccccttcccggaagatattcatccgaatagatacaggatgggaacttgtgatccggatatgggtaatagctgtaaattcccgaaaatcctgcttcttttaagatctgttcatactcttttctggtatagaccctcgcctcaccgtgcctgtcatcctctgtgaatcgttccggatccttatcataattttccagtccggcaaaatatcccccgcggtattcctcctgacaccccgcaaaatatttcagtcccagacggttggcatccgccacatagagtttcccgttgtcagataagtgttctctcatacaggaaagctcattttgaaattttgaaaattcgcctgcaatcaatatcatgtcataggcctgatcctgatacagtacatttgtttccggttttatatccgaagccggaacaaccagaaccgtcagattgccggcattttcataacgcacccgtaaaatgtcagcttcctcttcactctccaccactgccgtcacatgtaacgccatagaaagcagttttcctgtcagtgcaccgcatcctgcattccgctctaaaacatgcatctgctttgtcaccggcagaaatgcgatcaggttctccctgatatccgacagatgaaaaaggtacggataggatgcctgttccatgatgatctgcggataggctttttcattattctgttgtatgatctctttcagcccctccggcacgttcacatgtcccattgcttcctcacttttacgttctcctattcgtcacatttttcaatcgtaacttctgaattcatatcataaaaaccgacggtatttttgtcggataccaccgtcacaccgaccacatcatataatctgtggtacgcgcggaactctccgccgacataaccggtgcagctgatggataacagatattcgccgccctgcatatccatgttctggcggaatgtcgcaacataggtatcacctgtctttgccatcccgatgcccactttttcaaacatcgtgtttgttccggtaacagcagttccctgtacggttttaaatgtataagtaaaaatcggatcctgtatatcagagaggaatttcaccttggatttgatggtaaaagaagtccccttctggatacagttcgtataattgccatattcatcgatcagcgcaaagtcaatgatctccgcctcaccggttccatattcattgacatccgggttgagctggtaattggatttccagagtttctttccatcggacgcatcattttctaaaatcttaccgccagtgatcttgtctgaattcttaagcagaacctttttgtaaaggttgatcatatccttggcatttccctctgccagtttatctcccttattgagtaagatgacacggtcacaatattttgccacactgctgatatcgtggctgacgaacagaatggtctttccctgcgccttgaaatcctcaaactttttataacattttgcctgaaaaaatacatctccgaccgataatgcctcatccacgatcaggatctccggatcaatattgatcgccaccgcaaacgcaagccggacaaacataccgctcgaataggtcttacacggctgatgcacgaaatcaccgatatctgcaaattttaagatatcatctaaccttgcatccatctcctcgcgggaaaatcccatcatcataccgtttagatagacattctcaattccggtatattccatattaaatccggcaccaagctctaacagtgcggaaatccttccatcgatttccacctcgccgctcgtcggacttaaaacacctgtaattatttttaaaatggtagattttccggatccattggttccgataatgccgatcgtctcaccttttttcacctcaaatgacacatgatttaacgcatgatgttctttgaaacggttctttctgaccagtccaagagcatcctttaaccggtcagacggtttatcataaagtttgtagactttgcagacatcctctaccctgattgctaaattatccatactatcctcattccacagttttcattcttgcgatgctcttacagcacatctgcgaaatgtacacgcagacgcttaaatacggtcgttcctgcccagagagtaaacagcgtgattccccagaaccacaatgtcagtcccggatgctcccagaatgccgttttattgatcagtgcatcccggtatccggaaacgatataatacatcggatttagcttaagcagtaccacagcccattttggaatgccctgcatgctctcaaaattccacatgatcggtgtcacccacattccaatctgcaaaagaattgcgacaacctctttcatgtcacggaaaaacaccgtcacagcacttgtcgcatagatcagtcctgccgtaaacgtcaccatgcaaaacgaataataaaccacctgaagcacataaagatcgggataaaatcccataactgcaaaaacaaccagcataaacacaacaaaaaatgcatgtgtaaatagtgcagagatcagttttaccaccggaagtgcatcgatctggaatacgacctttttgaccagataactgtattcatcaagaaccccggttcctccatttaaagcctcctgaaaataaaaccacggcacaagaccgcccatcagccagagtacaaacggcacctcgattcctgttcttaaatcattaactttctgatgtagtccaaactcaaagacaaaccagtataaaagcaccgtgattaccggctgtatgaaagcccatatcacgccaaaataagaacccgcaaatttttttttaaaatcatttttggcaagattgccgatgagtttacggctggcaatcagacgttttggcaggcagacatttttcttcttttctgtcatatgagtgctcctatcttacaattccccgttccttacaatatgcatcaaatccaccgtgcactttatccttatcggaaaggatcagatccgcctgtgtcattccttccggcattggccattcaacaccgattgccggatcattccagagaataccgccctcgtcatttggatggtagaaatcagtaaccttatagcagaactctgcataatcagacagcacgataaagccatgtgcaaaattctttggtacaaaaaactgctttttattttccgcagtcagaacgatgccaaaccattttccgaatgtctcagaaccttctcttaaatccactgcaacgtcaaatacctctccgcttaccacgcgcaccagcttgtcctgcgggtggttgatctggaaatgtaatcctcttaacacaccttttttcgatgcagactggttatcctgtacaaactggcagtcgattcctgcctctttaaaatcgttgtaattgtatgtctccatgaaatatcctctggcatccccgaagactgccggctcaattactttaagtccatcgattccattacagtcatgtgttacctttatttttcccataattattgatcctcactatctgttttttaaagtccttcggcaacctctaccagatatttgccataatccgtcttaagaagcggttctgcaagttttaacagctgctctttatcgataaatcctcgtttgtatgcgatctcctcgatacaggacacataaagtccctgacgtttctggatcgcagacacaaaatctgcagcggcaagcagcatgtcgtgatttccggtatctaaccatgcgaatcccctgccaagcgtctcaacgcttaaatcaccacgctctaaatatgcattatttacggaagtaatctcaatttcacctcttgcagacggctttacatttttcgcgatctctacaacatcattgtcataaaaataaagtcccggcacagcataatttgactttggatgctccggtttttcctcgatagaaagagcttttccgttctcatcaaactctaccacgccatactctctcggatctctgacataataaccgaagatcgttgcacccttttgattctgtgtacgctctgccgcactgcgcagaacctttgaaaaactctgtccgtaaaagatattgtctccaagaaccaatgcaacagcatcatttccaataaacttttcaccgatgataaatgcatctgccaggccccttggctgttcctgcacggcataagaaaaactcatgccaagctggcttccgtctccaaataactcttcaaacaccggcagatctctcggtgtggaaataatcagaatctctcttatgccggcaagcatcagtgtagataacggataatagatcatcggcttatcatacaccggcataatctgttttgaaattgcctttgtcagcggatataatcttgttccggaaccacctgctaaaataatacctttcatataatcctccttgttttcacgtccattataaaacgcaaacaagcagtatcgccccatctggcggtactgctgcctgcatcttcttacctgttctgatacatatcctcataatacttctgataatcaccgctggtaacgtttttcatccagtcctcatgttcaaaataccatgcgatcgtctttctgataccctctttgaacattgtctccggctcccagccgatctctgccttgatcttatccggtgcgatcgcataacgtctgtcatgacctttgcggtccttcacataagtgatcagatccttgctcacaagtgcacgtctcggatcatctgccggaagcatctcaagcagtgtatctataatgatattgataatttcaatattctgtttttcattgtgtccgccgacgttgtaagtctcgccgaggcgtccgttttcctgtaccatatcgattgctttcgcatggtcatccacatacagccagtcgcggacattttttccgtctccatataccggaagtttctttccatgcaatgcattgttgatgataagcggaatcagtttttccgggaactggtatggtccataattgttagaacagttggtaatgtttgccggaaaatggtaagtgtcaatataagcctttaccagcatatccgaagatgctttgctcgcagaatacggactgtgcggtgcatacggtgttgtctcataaaaatatgttccgtcatcctctaaagaaccatatacctcatccgtcgatacatgaaggaatttcttcccttctttgaaactgccatccggcagctcccatgccgcttttgcacagtttaacataactgctgttccaagcacgttcgtttttacaaatacttccggatttttgatactgcggtctacatgactctctgctgcaaaatgtaccacgcggtcgatctcattttctgcaaaaatctttgcaattgcctctttatccgtgatatctgcacgcacaaatgtataattttcacgattttcaatgtcttttaaattttccagattgcccgcataagtaagcacatccacattgataattctgatctcgttatcatatttgcgaaacatgtaatgaatatagttagatccaataaatccggctcctccggttactaaatatgttctcatagttttctccattctatggtctgcaaaatctttcatcattttaccatacttttattgtctgtacaagttttaccaccagtccactgccgggcgttccgtagtttcagacagcttgacgaccaccagatctttttcttccacgattgaaccctcagccggaaagactgtcatatcttccgacagtgctgccgccttatattccatctcttcggaataaccatcgtccagatggactccattatgtgcttctaaaaatcctgcgatccggtgcgttgcccccgccggatgttctctggtataatcccattcaaaaaatgaccacccgtacatttccgtacggcggttcaagctgtttaactgtggctgccggtatccgataaataccacttttttatccaccggatctccttctgcatccaccccggggatctccctcttcaaagcatccgtgatctgatccgccagcagcgcatcctgttcataacgcacctgatccgcgctgtgcattctgatgttatagcagacctgaccgcctgtaactgcgattacaagcaatatcaccacattgcccattacctgcagccatcggcacattttcctgtcccgctcctgtttttccggtcgtacatcggaaatctgctgctcttttaatatcatcacaccaaacatcgcaagaaatgcagccacaaccggaagtgcaaactgtgtccttgtcaccagcatcgcacctgcatagattgtcattaaaaaaggtgtaatgagcataaaaatcattcctgctgcaaaaatccaaaaaccggcacgtccactttctgttcttctcgtccatgcgatccatatcacataaaatgcgagcagtacaccgatcacatagaaagagaaattccgcggtccgacggtaagaagctgatttttcacaacacgaagaacattcttgacacattcagcagccggttcacttccccagttgctctgcccttccatataatcaccggctgccatgaaccatgtacccgcaatccccctgtatatcagataggaaataccgaaatgggccacaagaaaaataatgcgaattccccatttttctctttttccattcacctgccagaagaacaataagaaaaacatgacacagactgcaatataataaactgccagtgcctggtaagtaccaagtgccagcacaataaacactgtggacaaaaacagcttacacagatcttttccgcttctgttctccttatatttctcgcaaaaacaaagatcacacataaaaaatccggtgactgccatcaaaagcattgcaaatgcgacttccgcctgctgcagtgaaaaataaaactgaaaactccagatattggatgtcatataaagcagcgtaaatatccagtacggttttccatccttttttcctgaaaaataatagcatccatacgtcagtacattgcctcccaggataaaaaacaaaagcatcagaataccactctttatcgttcggtgtacaccaagaccaagcatccgttttaacagaaccagtccaaatcttccaatcgtaagccaccctaacgtagacccgggatgattgatcagttcctctgtatcgattctgatattcgagttaaatgcctgatacccaaaacagaccagcgcagcaaataccgacatcagaatcagccggtaatgttttttgatatattctgtcatcgtattattccagtgttttcatatactcatcaagtgcatcctgccattcagccattttgtaaccgtctgtcagtttcatcatatagttctcaagaatcgaatatgccggtctgtttgcagaagccggattcatcttcgcatactgctcacttgtgacatggttgacttttgttgtctttcctgcacgtttaaaaattgcttccgcaaaagctgcccagttggtatcgccctcacaggttgcatgaaatgtaccataattttctgtcggttcaaaatgatgaatggctcttgccagttccaccgcacttgtcggggatccctgctggtcacatacaacactgacttcatcgtgtgactccgcaaggcgaagcatcgtctttacaaagttttttccatctccataaagccatgcggtacggaaaataaaatatctgtctgcaaattcacggacaaacttttctccctccgccttcgtctttccataggcactgaccggatggatctcatcaaattccgtatatggctttgttccgtttccctcaaatacataatcggtggaaacgtggatcatttttgctccgacttctcttgctgcaatacttaaatttctcggtccgatcgcattgatccggtatgcggcatcccactgctgttcgcacgcatccacattggtgtgcgctgcacagttgataatgacatccggtctctccgcacgaaccagcgcaaggacagcattcacatcggtaatatcgagcgccacaatgccttcaccttccgcaacatctgtattgataaaggaaacatcctcacctttatattcctgtcggatggcacgccctaactgtccgttgcaccctgtcactaagatctttttcatcatttattctcctaatccattttcaattgccgtaacaatcgacgtaagtgcttctttttcatcttctccttcgcagacaagctctatttcatccccggatttgatgcatgcaccaagtacactcaacacgctttttgcatttgctgtattttctctgtaacgaaatgtcacatgtgatttaaactgcatggcctccttgcataaaattccagccggtctcaaatgaagtcccgtcggatttttaatcgttactttctggcttaccatagtaaatccctccaaactgtttattgtatatacgatatttaaagcatgatcttcgtaatcagttccgctaactttttagcttcctcatcgatcaccttttgatcttttccttcaatcatgacacggacaagcggctctgtaccggatggacggatcaaaactcttccctctccgttaaacttctgctctaattttgcaactgcatccgcaatctcctgataatccataaagttgtcttttttatggtttggcacttttgcatttacaagtgcctgcggtaatacttccataacagatgcaagctctgataaagtttttttcgttttcaccataacctcaagcagatgaagtgcagaaagcagaccatcacctgtggtgttgtcatccaggaaaataacgtgtcctgactgctcgcctccgatattatagccatgttctctcatattttcaagaacatatctgtcgccaacttttgtcttttccacatggatgccttcgcgctctcccatcagtgaaaatccaaggtttgtcataacagtaacaacgatcgtattcttttttaaggtacctttctgtttcatataagtaccacagattgccatgatctggtctccatcgaccagttctcctttttcatccacagcaagcatacggtctgcatctccgtcaaatgcaataccaatagcagcattttcataaactactctggcttttaattcatccatatgcgtcgaaccacagtttgcattgatattcgttccatccggttcggtatggattgccaccagatcagcccccagatctttcaatgccttcactgacgtataatgagcggctccctctgcacagtcaaccacgatcttcatgcctgtcagatcaaccggaacacattttttcataaattctacatattcgtctcttaaatcgaaacgataatcaattttaccgactccggaaccgatcggcaggttgacatccttcatattattacggatcagtgcctcgatctcgtcttcaagctcatcagaaagcttatatccctcgccgttaaaaaatttaattccgttaaattccatcgggttatgggatgcggaaatgacaaccccggcatctaccttatgttttctcgtcagatacgcaattgcaggtgtcggcattactccgacaaaaatcgcatttgcaccgacagaacagattcctgccatcagtgcacttgcaagcattcctcctgaaattctcgtatcacagccaacgataatcgttgcctgatgttcctgctctttcgtaagcacataagctcccgcctgtccaagttttgtcgcaagctcgatcgtaagttctgatccagccactccacggacaccatctgtaccaaacattcttgccattgtatttcctccaaattattaatttcttttattctgttttagaagcactctttttgctgctttccgttgattttatttccgtatcttccgcagtcattttaaccggaatccgcacggtttttacctgataaagttcattatccacatcaatatctgcagcgatattatgttcaccatttccatatccctgcagattaacagtacctgtaatgtcatctgctgacagcttcttaatatcgctttccgctccggtgacctcaacctgaatcgtatcttccgtaatcttcgcctttgtcgcatccggaatattttcaagcgtaaacgcagatgcatccacctcgaaggtttttgttgtgatcggctctacttttactttgacctccacttttgcgtctgctgcaagtaccagcgaagttccatccggaagataagatgtaatatctacagttgtctcaacatcttccgttgcaccgctcatatctaacacatcatccggtattgcgatcttagccaccttattaagcacatccgtttctcccttgatccggacttttttcggactgtaggtaatttcttttaatgtatagccggatgccacagttccttttgtctggaaggaaagatccacatcttttgtatttaatatctgcgccgtgatcgtaacagtattaatattcatttttaactttgaagcatcgatctcattaccatccgcatcatataaaaccggcactactgtatcagtcacatccgatgacattccgtcaacattgatcgttgcgactaccgtgctgatctgactcgtaacagaagacggtcccgaaattttcaaaagattcgatgtcacgatggaaacatctccaagtgcacagccatccatgaccgtaccttccgtgcttgcagtgatctttttctgtacatttccaagatcttccactgtcacatccagatactgctgtttggatgaaatggtaactgtattgctgttatatttactgcatgtgatcgtaatcgggacacggcatacgccatcaccttccacatattcaatcttttccatatccgcaactgcagtaaaatccgtgttggataatttttccagaatacttcgttttgccgatgccgtaaacgtaactgtatttttcccgccaagtgtctcggaatactttccatttgaggtaagataatccatattatcctgtgttacactgatcgtatactgtgccggtttgaccggatcatcaatattgaccactacgatccacagagcgatcgcaaataacacagccagtaccttgaggccaagattattcgttagtttttttgccagattctttaacatccttaagcctccttctccataattcaatttttgaaactttcttctcgcgatgctgtataaatgaaagtttgttctttaaaaactcagcgtccacattgcggtacaattccccacccatggcgatggaaacttttcccgtttcctcagatacaacaatggtaagtgaatcactgacttcactgattccgaccgccgcacgatgtcttgtaccaagatctttgctgatacttaaagaatccgtcagtggcagatagcaggtggcagacaccactctgtccccgcggacaatcacggctccgtcatgaagcggtgtgtttttttcaaaaatattgatcaaaagctggcttgtcagtattccatctactgcaataccggttctttcatactccgaaagaacaatttcatcctcaatgacgataagtgcacctgttttgacttttcccatctcataacatgcctttaccagttcattgatcgttttatccgtaaactttgcgatttctccctttgaaaaatcaaacgcaaaaaaagaagtaaggaaattcttctgtccaagattttccagtgctttccggatttccggctggaatataataactatggcagtaattgcgacgctcaatgtgttcttcgcaatccagatgatcgtattcatctgaaatacagctgcaaccagaacaaaaagcaatattaccataataccttttaacagtacccatgcccttgtgttcttaatccacacaagcatataataaaacagaaatgttatgatgagaatttccacaacatctgtcattgtaatctttggtaaattcaaataaatagacgctttttcccaaaacgcgcccatggttgccatcgcattctgcacctgcttcactttcctttccgctatctgtatttaaagtaactaatccagcagatcttcgtcaatctccatttcttctgcgaaacgttttttcgtcatacgatcctgttcttcttttccactgaatctggtcacttttttatctgtccctgcaacgattgctttcggtacggcttttacataataataatactcatcatcttcaaactggagtctttctgtccttgaataatccagattgaaaaacaggaactgaatcacaaatgcaatcacgcaggaaataatgcttcccaccagaattgtgatggtctttccgctgattccaagtaccatatcccctgcgatcataccaactgcctcgaataaaataccaaatataattgcgaccgcccatgcatgctcaatggacatttttcgtatgatataaacgatgaccagtgttaccaccatgatcgcaagcaccagatacatttccctgttgcccaaaagctggttcaacgcaacaacaatctttgatgttgccgcatctttctcatccactccgccaagtgttgtttcattctgctttacaccgtttaagaagaaataaagaacgataccgcagaccagagaaaacatggaatataattcccgcaaaagtcccatgccgaccggcatcacaaacggaatgttcagtccaaaacaaatcggtgtcaaaagcaccccatactcgttttttggagaaaaccgaaaatacaggatatacatcagaataaacaggatcagggccacaatacatacttctaaggaaagtgcatacatgtccaaaaggatcagcacagagccaataaaaacggcccccccgactggaagaatcgaacagatcagggcaaggatcagggcaattggtgtactgctgattttttccatataaccaatgttgtgatttatcagcaaaaatgctgtgagtgcaacagtaaactttatcaccggcgtaatgtatatatcatattttccataaaaacgtgttaatttctcttttaattccaataaggtcgtcatactaatctccatttccacatgtgaaaaatctcattttccgcattgcttccgttgtcagtcccagtctttgtttccgttccctttcaaccgttcttcccgcagatacatcgcactgatcttttttagacccgcatagtatttttttaccttttttctgccataagtgtacttcatattaaaaataatatatgtggcaagaagataaattaccataaaaattccatagagcagtcccagtgtagtagcagcctttacaaaatccattttgttgatctgttccatcaaagcatccatagaatagagtacccaaagccctaacatcataaaaaatgcgatcgtgccgaccacgaaacttttcagaagctgtaatgccacataatcctttcgcgcatactggatcatcggtttgcagcgttttccatcgtttgcatcaaattttgctatttttatcatgctgtgcagtcgttgttcattgaccatgctgcgtttcctttctcttagcaaactgcatttttgctcgcagttacgcattcttatttttcattatatcacagtgcccttctttttcaaaggaaaaaaagaatcctgttccacaggattcaccgcctgcggcgggtcgcccccgcgacataattcatctctgacgcagtgcgatcccacccggagggcttttttattcataggacgtaattccttatgaataaaaaagcaggaccacctgtcaggccctgctcttctcttataagaaacgcatcttgtttccgtcgcgttcttttttctgtggttctaaaggctttggtttttcaatcgagtttgcgaatgaatttgccattgccgctttacacttttcgcaaaagcgccccgtccggatcggtctgccgcaatgctcgcaggtaacaccgtcaagtgaagcttctgaaagtgaaagtctctcttcacggatccactgcttgatctgttttactgatacatcattgtcctcggatacctgattaacagatgcattcgggttctcgtccagatattgttttacttcctgaaacttttgttcaaatttttttctgcatccatcacacaatggtgcaccacccatataattaaataaacgtccacagcccttgcaattcttcacttccatattggcatgacctcctgtcattctgtcaatacccttctccgatactgatacagatataatatatgttttccactcctgacgctttcaggacttttgatacttcatccatcgtactccctgtcgtatagatatcatccacaagcacgactctcttatattctactatatctgctgtcaattggaaagcattttttaaatttctgtgtcgttgtgattcatttaactctttttgaggaattgtatttctcactcttctgaccaggtgctcatccactaaaatccctgcttttcttccaagttcccgcgcaaatacttcggcctgattgtatccgcgcagtcgcttcttccgggaatacattggaatgggaatcagcacttctgcttttattttgttcagccacactccatatttttccaatgctgcattcgcataaaactctgcatattctcttttatttccatatttaaagcggtacattgaatttcttataccaccctcataaacaaacactgcctttccctgtgtgtatacatgatgcttttttccacagtcggtgcaaaattcctttctctcatccacaagcggtttcccgcattttttacatgccggttctcctgccacatgcaccttgtctttacatagcggacaaataccctttcctgtcacttcaatttcatcacagactgcacatcttcgtggataaaggatttcaagcatctgaaataacatttttcttccatataggaaaatgtcattttttctgattttcataagatcctttccggatctctccctgcaaagaatatcatttttgccaaatacataccataaagtttttcttaattttttcttactataatgttgacgaatcccatttaggtctttataatttgtttattaaaagcgatagcactttaaagtcctaaaggacagcaatgtgaaaaataaaatttttcacacacaagatgtgtgccccggcacaaacttatgatgccctgaaaaacgggcaggaatggagaattctatgaaaaactacaaaaaaatcttatctgtcgtaatgacagcagccatggctgcatcacttgcagcatgtggaaacagtacagcaaacaccagcagtaccacagatgcagcagcttccgatgcagcacagacctcggatgcagcggccactgaaagtggtgcaggcacctcttccgatggcaaaaaatatacgatcggtatctgccagcagttagagcatcctgctcttgatcaggcaacccagggatttgaagatgcactgactgaattacttggttctggcaatgttacctttgatcttcagaatgcccagggcgagcaggcaaactgcgcaaccatcagcaacggtttcgtcgctaacaattatgacctgatcttagcaaatgcaacgactgctctgcagtgtgcagctgcagcaaccagcacgatcccggtgatcggtacttccgttaccgactatgcaacagcacttgacattgacaactggaccggctctaccggtacaaacgtatccggaactgcagatcttgctccgattgaccagcaggaagacatgcttgtcgaattattcccggatgcaaaaaatgtcggcattctctactgctccgcagaaccaaactctgcataccaggcaaccgaatttgaaaaagctctcgatgaagacagtatttcctataaagaatataccgtatcagattccaacgacatcgcttctgttgtacagagtgccgtcagtgaatgtgatgtcctctatattccgactgacaataccatggcaggcaatactgaatccatcaacaatattgctcttccggcaggtgttccgatcatcgccggtgaggaaggtatctgttccggctgtggtgtagccacactttccatcagctactatgatatcggttatacagcaggcaaaatggcatacgacgttttagtaaacggtgctgacatctcgaccatggatgtacagtatgcagagaatgttaccaaagaatacaatgctgatatctgttcacagcttggcatcacagtttctgatgactatactgccatcgctgccgaataaaaaatatttttgataaggggtttttctatgacaatacttatgtccttagacccgatggctctcttccgttccatgcccggcgcctttgcgcaggggctggtctgggggctgatggcactgggtgtatatattacatacagacttttagattttgccgatcttaccgttgacggttctcttgcaaccggcggtgcagttgccgttatactgatccgttccggcatgcatccatgggcagcacttatttttgcatttttagcaggtatggcagccggttttatcaccggaattctgcatactgcacttggtattcccggaatccttgcaagtatcctgacacagatttcactctattccatcaacttaaatattatgggaagttcgaatcaggctgtcagtgttgacaagtatccgttagttgtttccctgcgttacatctcggattcttccgctaccaaagtccggctgtttgtgacatgtgttcttttctgcgtggcggtcgttgcccttttatactggtatttcggaaccgagcagggacatgccatccgcgcaaccggatgtaaccggcagatgtcccgcgcacagggtatcaacactgatttccacacggtcgttgcgctgatgatctcaaacggtcttgtcggtctttccggaggactctacgcacagtatcagggtgccgcagatgtcaacatgggacgtggtgccatcgtcatcggtcttgccgctgtcatcatcggtgaggtacttttcgggaagttatgtgccggaaaacattttgcttttgcatataccatgttttccgtgatcggcggcgcgatcatctactatattgtaatgaatatcgtattatggctgaaactgccgtctgatgacctaaaactgttttctgccatcgtcgttgcgattttccttgcattcccgtatctcaaatccaaatacggcaggaaaggggtgtccgtcaatggctgaaatgttaaaactcgacaatatccacaaaacttttaatcccggaaccatcaacgaaaaaattgctttaaatggtgtcaatctgactttaaatgagggcgattttgttaccgtgatcggtggaaacggtgccggaaaatcaaccacgttaaacgccatcgcaggtgtatggccaattgattccgggaaaatttatatcggtggagacgatgtcacaaaattatccgagcacaaacgtgccaaatacctcggacgtgtatttcaggatccgatgaccggaaccgcaaccaccatgtcgatcgaagaaaacatggcgattgcagcaagacgtggtgaaaaacggggactttcgtggggaatcacccatcaggaacgcgatacctaccgcgaaatgttaaaagccttagatcttggactggaagaccgtctcaccagtaaagtcggtctgctctccggcggacagcggcaggcgatcacacttttaatggcgtcgatcaaaaaaccaaaacttttgctgttagacgaacacactgcagcacttgatccgaaaactgccgcaaaagtgcttgagatttctgataagatcatcgcagaaaatcatctgaccgccatgatggtcacacacaatatgaaggatgccatcgtgcacggtaaccgcctgatcatgatgcacgaaggaaaagtgatcttaaatatctccggcgaagagaaaaagaaactgaccgtcgaagatcttcttcaccagtttgaaaaggtcagcggcgaagaattcgccaatgataaagcactgttatcctgatatgcagatctgctaaagcacaacaggattttaaaattaccaataacaatagaatgcacactctgcgaacattctattgtcataaattaaaagctgccgtacaagggagccggcgttaatggttttcatcaccggttaccctgcatgacagcttcttattttttttacttatttttcttttaaacggtcgcagagtccgctgtaccttttctgctgtgaggtattctggatcatctgctggaaggtcacttcattgccgactaacgtcacacattttcttgcacgcgtgacggcagtatacaatagattccggttcattaacatcatcggaccgctaagcagcggaatgacgaccgccggatactcgcttccctgtgatttatggatcgtgatcgcataggcaagctcaagttcatccagaagtttataggggtactctaccattctcccttcatcaaactctatgatcatctgctctgcgaaatcattgatctgtcttatgattcccatatctccattgaaaattccaaggcctttatccacagtgagtccaaattttgtacggatttcccacgcgagctggtagttattctttgtctgcataactttatccccctcacggaacaccgtgctgccatattctttctccactttatcattggcaggcggattcatatatcgctgcaaaatcccattcaggcgctctacgccaagcagtcccttgcgcatcggtgtcagtacctggatatcataaggcgtcgcatccacaaacttcggcagtttctgcttaatgagctgcagcaccacattgatgatcacatctgcgtcataccgtttcagaaaaaagaaatccatgctcttattatctaatatcacttcttctccatgattgatcttatgcgcattgacaataatatcactggtggatgcctgacggaagattttggtcagcataactacattgcaggcatgtgattggataatatcacggagtacacttcccggtccgacactcggaagctgattgacatccccgacaagaatcagcctcgttcccacagagattgctttgagcagagaatacatcagtgagatatccaccatcgacatctcatctacaatgatcacatccgcttcgagtggattactttcatccctttcaaatccaccgcttccctcggctcccccattcagctctaacatacggtgaactgtccgcgcctcaaatcccgttgtctcactcatgcgctttgctgcacgccctgtcggagctgccaaaaagatttccaagccctccagttcaaaatagcggatgatcgtattaatcgtggtcgtctttccggttccaggccctcccgtgatcacaagcagaccattccgcactgcctctttgaccgccgttacctgatgttcatccaacgtcatgccgcttttcttttcgatcccccggattcgctgttcaatctccgcatctgacacatcataacttacattgagccgttttaacatcgtcgccgtgtttgcttccatataataaaatgacgctgcatagatctgtgtctgatcttccatctgttttaagatgatcttcctttcaatggcaagatccatgtactgcttttccacctgttctgccgtaacattcaataattttgatgcacgcggtgtcagctctgtctccggcagataggtatgtccctccccacttgcctgaagcagtgtatacaggattccgcttcgcacacggaaatcagagtccatccggataccaacccgcgccgcgatctcatccgccgtccggaatccgactccatcaatatcgtccgccagccggtacggattttcccggatgataccataaacatcctgtccgtatgcctgatatacctttaccgctaaattcatcgtgattccatactgctgcaaaaagatcatcgcctgccgcagatccctcttttcgttgacctggctggcaatctccatcgctttgcggttactgatccctttgatctcagcgagacgttccggttcttcctctatgatccggaaggtatcctccttaaaacgcctgacaattcttgccgccatggcaagcccgattcccttgattgcaccggaaccaagataccgctctattgcctcctcatcttcaggtgctttctcctcaaaacttgttactttaaactgctgcccataggtcggatgttccgtgtactccccctgtgcctcaatattttctccctctgcgattgccgaaaatatccccacacaggtgatttcatcctccccgctcaccagatttaacacggtatatccattatccgcattccgatatataatgtgttccacatatcctgcaagactttccactgttttctccattccagaattctgttttctgctgcgaaagcaataaaataaacgctttgtgagcgagctattgccatgaataaaaaatgcagtctaacgggatttttgaacccatcgttcattttcccgttaaaactgcaccgatttttgcatactgtttcaattatgtacttatctgcacactttacttctgctgcgccgattttacgacattttatctgcgcaaacttattctatattataattacgtttcatctgctcatagagctgctgcgtaaaattggttccaacctcatctacaacctggtctgcaaccagttcgatgacattgtccatataataatctttcagtgttgatgtggaagaatcctcctcatcatcctcacttgtcaggctctctttaatttcttttaaaacttcttccacaaaatatgattcaaaatctttacaaacctgcatcagttcgtcctcggaagaatccgaagaaatactgtttaaggaactctgcagggaacttgcctgatttgcagctgctgtatttttgcttgtatcgatcaatgatgaaatgctgtccatggaaatcatattgtttttcctttcctacatccgctgtctaatcttaacgtttcagattgtttgcctgctcaagcatctcgtccgatgttgtgattgcctttgagttgagctgatatgcacgctgtgcaatgatcaggtttaccatctcatctgcgacctgaacattagaaccttccaggtatttctgtaaaactttgctcttagtaagatttgcagttgtagactcgttcattgcattaccggatgccggtgtcactgcaagaagattggttcctgttttttcaagtccgcttggattattaaactggaataatccaatcgtctggttcatatccacatatgtgccggctgcattggtatatcccatttttccattttcgctgacgatcactttctctgcactgatacctgccggaagattgatcggctgattgttggaatctaaaaccgggtatccctcattcgtgcaaagagttaatgtaccgcctgcattgacagaccatacaaaatctccggctctggtataataagtttttccgtctgctccgcgcactgcaaaaaatccatcaccgctgattgcaaaatcagttgcattctcacttgccatcagtgacccctgtgtataaatagaggtgttggatgccactctggtaccaagtcctacctgtgcagagatcggcttttcctcgccatttgcactggttgtacgcgtctggattgtctggtaaagcagagacttaaactccatcttctcctgtttatatccgactgtattgacatttgaaaggttatttgaaatattatccacgtttgactgctgtgcaatcataccggttgccgcagtataaagagctctcatcataattccagtttacctcctgcttatacctttcccacctggtttaccgctttgtctaatgtttcatccacagcgttgatcaccttctgtccagcctgaaaggctctcgatatcgtgatcatattgaccatctccgaaacaacattgatattggatgattcgatacatccctgcgttactttcgcagtggatgcctgacggacaccgccatttaccaggtcatacatattctcgccgtattttgccagataattataatctgcaatatctacaacgccgatcgtgccaacctgctggttattctgaaaaatgttacctttttcatccaccgtgatcggtacattcggatccacctgaatacgtgctcctgcatccgcattcatggctccattctgatttaatacatagtcgccgtcttttgtgacaagataacctgctgtatttaccacaaaggctccatccctgctgtactttacagatgtgtttcctgctttatccgtataggcgattgcaaagaaaccatctccatccagtgcaaaatccgttgcgttatctgttaccctgaaatttccctggctgtaatccgtgtaagtctctccgatgtgtacacccatgctcatggttccaagcttctgcggcatgccgtagctggatgtatccttgatcttgatcgcaagctcatctgcaaacgtctggtttgtcgctccctctttcttataaccattggtgtctgcatttgcaaggttattcgaaagaatgtccagacgattctgttcattgatcattcctgtatacgctgtatacaatccctttaccatgtaaactctccatttctgcacagcttctgatgtattttaatccgtatttccgcatatgaaaaaccttatttttcacacgttttccctatctgtgcacaaagcatatctttcatttattgtatcggcaaaacacaaaaaaaatttaatcttcgtcacgttttccggctaaaaactctacgaattttccggtaccgattgcaacacatgtcatcggttcatctgcagtcatcgtattgattccggtgcgatcctcgatcagctcctccaaacctctgagcaatgaaccaccgcctgtcagcacaataccacgatccgcaacatctgctgcaagttccggcggagttttctccagtacagaatgtactgcttctacgatctgaagtgtcggctctctgagtgcctcttctgtctcctccgaagaaaccgttacagttttcggaagtcctgtcacaaggttacgtccgcgtacatccatcgtctcggcctgtgcctgtgggaaacagcttccgatacggatcttgatatcctctgcagtacgttcaccgatcagaagattgtgctttttacgcatataacggacaatcgcctcatcaaaatcatctccggcgatcttgatagaggtgctgacaaccgaaccgcccagagagatcaccgcgatatcggctgttcctcctccgatatccacgatcatatttccacaaggtcttgaaatatcaatacctgctccgattgccgcagcgatcggttcctcgatgattgcaacttctcttgctcctgcctgataggttgcatcctcaacagcttttttctcaacctctgtgacaccgcttggcacacatacactgatgcgcggcttacggaacgttttcttaccaagtgctttctggataaagtacttgatcatcttctctgtaacctgataatcagaaataacaccctgacgaagtggtctgactgccacgatatttcccggtgttcttccgagcatcagtcttgcttcctctccgattgctttgatcttatttgtatcacggtcaaaagccacaactgacggctcctttaatacaacaccttttcctttgatataaactaatatactggcagtaccgagatcgataccaatatctgtactcatcattttaaatacttgcccctttcgtctctctgttcctgaatctatggataatattcccatatccacgcggacatagaaatgccattaaacctatttttacatatacagtcctattatatacaaaaaatgggatttttcaaaggtttttttatggcaggactgcatttttaaaaaaaataagaaaatcttcattcttttttatttattttgtttatttttcattttgtcatcacattttcatcacatttctattttatattctaagagtactagctaataagtccgatacaaacgggcccaaccgtcagaattactgacgggcagtataatttttcataactcatgcttcccggttttccgcaaggatttccggggagtactccccgaacgtgataaggcgctgcgattgcagcgcctttttaaactccttctataaaccaacctgccagttttttgatcttttcaacaaaaacaggaagtaccctattgtattttactgcaagccgggctgcacatctctgccctgtttttcctatggtcgctttcctgatctcatttattccgacagcaatgataaccacacacacagcatatcccaggactaaaagcaatagcaatttattatttccaaattgttcaatccctgtatatggtttcaaaaaatactgaatatgttcatcaagcacggtaactgccaaaacatttccggcaattctgttgataagtctgcttgaaaattcaaattccttaaaccataaaaaaatacagacggacgccatgataataaaactggaacaatcccttgaaaacgtactgtaaagtactccatttatctgcgtacgtacactgtccaggataaatatcagcaaaaccaaacttacagctcccatgccaagcctttttttttgcagtctgaccggatattttgacagataacgcccgatcaggtaaatcataacaaaatccacaaggccttttcccgaatcctgcataatatcataagtagtgatcgttggtatcacactgaataacagtaacatggtcacaagaagtctttcaaaattttctttttttattttttctgccagtgcattcaataatggtgcaagaaaacaaagcgcaaaataacaggagataaaccagtaacgcctggttatgatcggaaaacatgcaagtatcagttcttttgccttaagatccccccgcacggcaacacctgccaccgtataaaaaattaccataaaatccatttcaatcagcttttccagacggaattttattccaaagtatccggaaattaaaatgaaacaggttaccccagtattaaataatgcgttgacaaaaatatgactttctgtattccagacggagaggcttgtatcaatatttcccatagcatgcataaccacgattccaaaaatgcaaaaaagccgaagcaattcaaaattagactttctcatgtttcatctccccggattttctttttattcatgcaaactttctttccatattccagacaccggtttaacagcagacacaatacgattgcaacggtaatccgcacgatctggtaacataaattccatccactttccggcggcggaagttccattattttttctgctattacttccgtgctttgtaatataaatatatgaaaaataaggatcaccaccgtatttttccctatatatgcaagtatttttcccagccacatggattcaatcatggctccagcccacatgcagagaatcgatccgcaaattccaaccaatatgaaaagcaaaacactccatgctccataatttccatagcttcttaccgaaatattaattcccggattcacttttgccagcacaaaaaacaaaactactatacagaaaatccactttttcttccatttttctatactgcagttttgccctaacaaagtccctgcaatcatcagaaccgcacctgcaaatgcaatatctatactccatggaagtaaaattggcaattttgccagacacacagatacagccagaaaacatatgatataaccggcgcatttctttttacttcttatgcacacatcaatcacggcataataaacggcgcctgccgtaaataaagatgtcagataccacattgctccatttgcaatatccagaaaaaaaatgttatttttctcagcagcaatatccatgttataaaagcaataccttgaatacaatatcccgatacccgaaaacaacatttcctttgttgtgcggccaagtactttatatattcccaacagcacaatacttcccagaaaatatggaaccagaagtctttctgtctttcttttcatattttgtttataactttttccctgccggtacacatatccggaaagtacaaaaaataactgcataaaaaaacaggtcagatacattgatattcccattgcatgtcctgctacaacaagcaccattccgattcctcttgccacatcaatataaggatatcttctcattgcatccctctttttatttttaataataatacctgtctctattttctcacaaacagataatttgtacagaaaaatatctctaaaatatctccatactctgtaatttcctctactccgtctaaaaggacacggtatactttatattttgcactgagtaaattccagaaatctctgaaataagttctcgaatcgatattgcagccgccaaattccatctggattacatcaatttttccttcgtccagcatccgctgtgcaccatgcaaagcgtttaactcatttccttctatatctatttttaacaaattgattcgcggaatatttctttcttcacaataatgatctacggtatccagttttatacggatcggttccgcatgttccacacactgacgtttatacatgcttgccagtccatcgcattctgcatcgtaataaagaatgctttccgtacatgtatcactcattccaaaattattcattatcactttatcagacttcacctggctgcataaaatcttaaatgtttcagccgccggttcgaaacaatggatctctgcatttctataattctttaccagctcctttgcataatcccccctgttcgctccgacatcaaacaaaaccggcttatctatatttttaagcaggtttttaacataccccatggcatatttttctccactgctttcaaaatctccaccatttcctacgttcattcccatcattgatgccttatacaatttgttccatattctgtaatattttttctttccaaaaaaaggactcactattttctctgctaatctgctcattttttcctccaatttgtaaattatctgaatcgtacgttttcagtttctttatcatatcatatatttccgtatttgtgaatattttttcaccattatggaaataccaatctatacactagccttaataggaggtattaacattttgaatttaggagaaaaattgaaacaattaaggcttgagaaaaatctgacgcaaaaacagcttgcagacagactcggtgtcgcaatcagcgccatctcttcctacgaatccgatacccgttgtcctacttttgatacgctcataaaatatgcccgcatttttcatgtatcaacagactatcttcttggtttagaaccaatacacactcttgatgtatccggtctctcagacacagaaatcctggtcgttgcccagcttgttgatatcattcgaacaaaaaaataatgattcattccatacggatttataacgcaaaagaagtggctgccttttctacagccacttcttttcctctatacatatataacttccgttttatttatccttctctaaatacttcttcacataataacccgtataagattccgacacttcagccacctcctccggtgttccctgtgcgatcacggttccaccgccatctccgccttccggtcccatatcgatgatatagtcagcggtcttgatcacatccagattatgttcgatcacgattacagtgtttcccccatctgagagtcttcgcaggatctcgatcagtttatggacatccgcaaaatgaagtcccgtcgtcggctcatccagaatgtaaatggtcttgcctgtgctgcgttttgacagttctgttgccagtttgatacgctgtgcctccccaccggacagctccgttgacggctgaccaagcttgacataggaaagtcccacgtcataaagtgtctgtatctttcttgcgatcgcaggcacgttttcaaagaatttcaatgcttcttccaccgtcatatcaagcacatcataaatgctcttgcccttgtatttgacctctaacgtatcgcggttataacgttttcctccacagacttcacacgggacgtacacgtccggcaaaaagtgcatctcgatctttaaaattccgtcaccggaacatgcctcacagcgtccgccttttacattgaaactgaatctgcccttcttgtatcccttcgccttcgcatccggcgtcgccgcaaaaagatcacggatcatgtcgaatacaccggtatatgtcgccggattcgaacgcggtgtccttccgatcggagactggtcgatatcgatcaccttgtctaactggtcaatgccgatgatatcgtcatgcttccctggaatgcatctcgcacggttcagatctcttgcaagtctcttatataaaatctcattggtcagtgagctctttcccgatcctgacacaccggtgatacaggtcataatgccaagtggaatcttcacatcgatattcttaagattattctcccttgcacctttgacagtcaggaaacctgtcggctttctgcgctctgtgggaaccggtattttgattctgccgctcagataagcacctgtcacagaatttttatttttcatgatttcttctgctgttccgcatgccaccacttgtccaccatgcgcacctgctccgggaccgatatccacaatataatccgcagccagcattgtatcctcatcatgctccacaacaatcagcgtatttccaaggtcttttaagttctttaatgcgccgagcagtttatcgttgtctctctgatgcagaccgatcgatggctcatctaagatatatgccacaccaaccagtccggaaccgatctgtgttgccagacggatacgctgtgcctctccaccggaaagtgttccggttgcgcgggacagtgacagataatccagtccgacttcatttaaaaatccgacacgcgcacggatctcctttaagatctgatctccgatcagatgctgctgatggctcagctccatatcatttagaaaacttccaagattctttacggacatggatgtgatctcataaatattcttgtccgcaactgtgaccgctaaggattccgccttcagacgctgtcccttacaggtttcacacggcgtgatgcgcataaactgctcatattcctgcttcatcgtatcagatcctgtctcacggtatttacgctgtacatttcggatcagtccctcaaacgccacatcataaacaccctcgccgcgcatgcctttgtaatgtacctttaactccctgccatctgttccgtgcaggatcacatattttatctcgtccagataatcctggaatggtgtctccagtgaaaaatgatattcttctgtcaatgcttttaacaccgcgtaggtaaaactggaaggatctgtgcaggactgccagcccataacctgaattgccccctccgcaatggaaaggtgcttatccgggatcatcagatccacatcaaactccatcttgtatcccagtccaaagcaggtcggacaggcgccaaacggattgttgaaagaaaaacttctcggttcgatctccccgatactgattccacagtcagggcaggagaaactctccgaaaactggatcggttccccgtcgatcacatccacggtcatcagccctttggataattccagtacattttcgatagaatcagacaaacgcttctcgatccccggcttgaccatcagacggtctaccacgatctcgatattgtgttttttatttttgtcaagtttgatctcctccgtcagctcatacatgctgccgtctacgatcacacgcacataaccactgcgctttgcctgctctaagagcttctggtgctccccttttcttccgcgcacgaccggtgctaaaagctggatctttgtgcgctccgggagtgtcatgatctgatcgaccatctgatctaccgtctgttttttgatctccctgccacatttcggacaatgtgggataccgactctcgcgtacaaaaggcggaaataatcataaatctccgtaaccgtaccaacggtagatcttggattgcggttcgtggacttctggtcaatggagatcgccggggacagcccctcgatcttctccacattcggcttttccatctgccctaagaattgtcttgcataggaggaaagtgactccatatagcgcctctgtccctccgcatagatcgtatcaaacgcaagcgatgattttccggaaccggaaagtccggtcagcacaacaaattcatctcttggaatatctacatcaatattttttaagttgtgctcatttgccccccggatcttaatgtattttctttcactttttttcttcatgatttactgtcctttttcttttcccaaaaacacttcttactgacgactatttcgtcactcttcacaatacaatgcttcctcacatatcacgcagcatgccctttaactccaccatcttgtcgcggtactctgcagcagcctcgaagtttaagtctgctgccgctttctgcatcttcttctggatgtctgcgatcagctttgtgagttcgtcccggttcatggattccgggtcttttttgaagttcatttcttcctttgcgaccttctttgacacgctgatcagttcccgcacagatttctggatcgttgtcggtgtaatgccgtgttcctcattgtatgcctgctgtatctcacggcggcgcttcgtctcctccatcgcaacacgcatggagtctgtgatcttgtccgcatacatgataacgtgtccctcactgttacgcgcagcacgcccgatcgtctgtatcagtgatgtctccgaccgcaggaatccctctttatctgcatctaaaattgccaccagcgtgatctccggaatatccagtccctcccggagcaggttgatgccgacaagcacatcaaatacatccagccgcagatctcttatgatctccgctcgctccagtgtatcgatatccgaatggagatatttcacgcggataccgatctcacgcatataatccgtcagatcctccgccatcttcttcgtcagtgtcgtaatcagcaccttatgatggtctttgatttccttattgacctcaccgatcagatcatcgatctgtccctccaccggacgcaccacgacctgcggatcgagcagtccggtcggacggataatctgttctgtcctaagcagctcgtgttcgtcctcatatacattcggtgttgccgatacgaacagcatctgatcgatcttgctctcaaattcctcaaaattaagcggccggttgtctttcgccgacggcagacggaatccgtagtccaccagcgttgactttctcgactggtctcccgcatacatgccgcggatctgtggaatcgtgatatgtgactcatccacgatgatcagatagtcatccttaaaataatccatcagcgtatgcggcgttgcccccgccggaagtcctgcaagatgtctcgaataattttcaataccactgcagaaacctgtttcttttaacatctcgatatcaaaattcgtccgctcggaaatgcgctgtgcctcaagcaacttgtcctcgcccttaaaataccggatgcgctcatccagttcctgttcgatggcatcgcatgcctttaagattttctcctgcggcacaacataatgggatgccgggaacaccgcaaagtgctccagctcgcatttgatctcccctgtcagcacatccacctccgtgatacggtcgatttcatccccgaaaaattccacacggaccgccgtatctccgtagtttgccgggaaaatctctaacgtatctccccgcacacggaacgtacctcggtgaaaatccatatcatttctcgtatactgaatatcgaccagcgcacggatcacgtcatctctgtccttctccatcccgggtcttagggaaaccatcatgccaagataatcttccgggctgcctaaaccataaatacaggaaaccgatgccaccacgatcacatccttgcgctccaccagcgccgccgtcgctgaaagacgcagtttatcgatctcctcattgattgcggagtcctttgcgatataggtatccgtctgcggcacatatgcttcgggctggtaataatcatagtatgacacaaaatattcgaccgcattctccggaaaaaattctttcatctccccgtataactgcgctgccagcgttttattatgcgatatgatcagtgtcggcttattcaatgcctggatcacatttgccattgtaaaagtcttaccggaaccagtcactccaagcagcgtctgaaactggttgccctcctcaaatccttttaccagctcctcgatcgcatgaggctgatccccggttggtttgtattttgaatgtaatttgaaatgatccatgatattcctcatttctccctatttataaaatatagaaacactttctatccggaaacaattaacatcaatattttagtatgattctgtttccagtatatcattcaatttataaattgtacagcaaaaatcgaacttttgttctgtttttctgcaaaaacaaagcacaggacaatattttatcccatgctttgctatgctatgctttgccttttattttacactgtttattttataccatactgttcacaatcgcatccgccagtgcatccagctctgctttctggtctgcatgcattgcagacttgatggtaagtcctgtatcaaggatcgtcatatccttcatttcactgattttctctttaacctgctttgccgctgtcggtgcccaggttccgttttccataactgcaacggtctttttctgaacagccagtgccttcatatcggaaagcagattttccataaccggataaattccggcattgtaagtcggtgccgcaaataccagatggcttgcacggaaaatttcactgatcagctcggaaacgtgcgcatttgaaacatcatacacagcaatctttttcacgccgcgcactgcaagtgcccctgcaagcgcatctgccgcagatgccgtattgccatacatggatgcatacatgatcacaaccacctgatcttccgcttcataagtactccatttctggtatttttccagaatgtaagagagattttctctccagattggtccgtgcagcgggcagatcacagcgatctcaagtcctgcagctttctttaataatgtctgcacggacgcaccgtattttccaacaatatttgtgtaataacgtcttgcatcgtccagccagtcacggtcaaaatctacttcatccgcaaaaacattgccgtttaatgcgccaaaggatccgaatccgtctgcggaaaacagcactttgtccacatcatcgtaggtgaccattgcctccggccagtgcaccatcggtgccatcacaaaatgaagcgtatgctttcctgcagataaggtatctccctctttcaccacaacagaacgttcagaaaaatctgttccaaagaactggttcatcataccaaatgtctttgtatttccaacgatctttacagccggatatctgcgtacaatatcaccgatcatcgcgcagtgatccggttccatatgatttacgatcagatagtctaatgatcttccctctaaagcagcttccaggttttcgaaaaactgtcccgcaacggaagcatccacggtatcaaaaaggacggtctgctcatccagcagaacataggagttgtaagacacaccgcgtttgattggaaaaatattttcaaacaatgccagtctgcggtcgcttgctccgatccaggtaatatcatcagtaacttttcttatgttatacatatccgtctccttctttctctccattttataattggcttttccggtgaaatcataccacatacttatccatgtttcaatgaactgcatacagatttataaaatgtttattttcatcgtcttccatatcgcatatcttttactatttttaataatagtaattattactgttattaaaatatcaaataatccattttttgtcaattatttttttgtgaagattcggacgacaaaaaaagcgccacatttacgaatcactccataaacatgacgccctcttcttattttaaaattttatgccatttttccacagcactgtttgtattttttaccggatccacatgggcacggatcattcggataaacctttgcagccgtacgttttttcggtgtattggttgccgtctcatccttatttgtaccggttacttttgcaacctgctcacgctctaccttctgttcgatcttgacatggtacagcagacggactgtatcttcctgaatgtttgcgatcatatcgtcaaacatgtcaaatcctgccatcttgtactcaaccagcggatctctctgtccgtatgcctgtaagccgataccctgacggagctgatccatatcgtcgatatgatccatccacttacggtcaatgacttttaacagtacgacacgctctaattcacggaactgctccggctccgggaactctgtctcttttgcctcgtacagtttcactgcacgctcttttaagagatgttttaattctttattattcttaacactgtccacatcagcagcatttacaggctctaacgggataatatccgtcagaagctggtttaactcgtttaaatcccactcttctttcggtaattcagaagaaatacaggtatccacgcagctctccacacggtctgtgatcatcttgaagatcacatcgcgcatgttctcgccgtttaatacacgcatacgctctgcgtaaatgatctctctctgatcattcataacctgatcgtactcaagcaggtttttacggataccgaagttgttgccctcgatcttcgtctgtgccttctcgatcgcagatgttaacatcttatgctggatctgctcattttccggaacacctaatgtattaaagatatccatcagtttttcagaaccgaacagacgcatcagatcatcctcaagagagataaagaactgggattcacccggatctccctgacgtccggaacgtccacgcagctgattgtcaatacgtcttgactcatgacgctcagtaccgataacttttaatccaccggcttccttcgcatcatcatccagcttgatatcggtaccacggccagccatgttggttgcgatcgttaccgcaccgtgctgtcctgctgccgctacgatctctgcctcaagttcatggaacttcgcatttaaaacagtatgctggattccctctctctttaacattgcactgatcgtctcggatacatcgatcgtgatcgtaccaaccagtaccggctgtccttttgcatgtgcagcttttacttcctcgacaactgcatgatatttttctttcttggtcttataaacagcatcctgtttgtccacacggatgactggtctgttggtcgggatctcgataacatccataccatagatatcacggaactctttttcttcggtcagggcagtacctgtcatacctgattttttttcaaatttattaaagaagttctggaacgtaatcgttgcaagcgtcttgctctcacgttttacttttacatgctcttttgcctcgattgcctgatgcagaccgtctgaataacggcgtcccggcatgatacgtccggtaaactcatcaacgatcagtacctcatcatcctttacaacgtaatcctgatcgcggaacatcaggttgtgtgcacgcaaggcaagaatcacattgtgctggatctcaaggttctctgcatctgcaaggttgtcgatcttgaagaactgctcaacctttttcacaccttcctgtgtcaggctgacaaccttgtccttctcattgacaaggaaatctccggtctcttcctgctcaatacccatgatggcatccatcttggaatactccggtacatcctcaccacgtttcatctgctgtgctaaaatatcgcatgcctcataaagacgggtggatttaccgctctgtccggaaatgataagtggtgtacgcgcctcgtcgatcaatacggaatcaacctcatcgatgattgcataatggagtcctctctgaacaagctgctccttgtaaataaccatgttgtccctcagataatcaaatccaagttcgttgtttgtcacataagtgatatcgcagttatatgcctcacgacgctcgtcattggtcatggagtttaaaaccactccgacttttaagccgaggaactcatggatctgtcccatccactcagagtcacgctttgcaaggtaatcattgactgttacgatgcacacgcccttgccctctaaggcatttaagtatgcaggcagtgtggaaacaagtgtcttaccttcaccggtcttcatctctgcgatacgtccctgatgtaagataataccaccgatgatctgcacgcggtaatgctccattccaagcacacgttttgctgcttcacggacggttgcatatgcctccggtaaaagatcatccagtgtctctcccttttccagtctctctttatattcttttgtcttgtctcttaattcttcatcggacagtgctcccatggcgtcacggtatgactccactttgtcaacgagcgggtaaattctttttaactcgcgttcgctgtgtgttccgaataactttgtaaatgcgctcataaaaactcctattcctggctgtttttctcaaatttgcaagtctgttttccgtccttttgcaggctaagccttgcacaatatcgttattgtaacacttttcgtgtattaccacaactaaaataggggtaaacgttttgtgaattttttattaacgcaaaaaaagtccttgcactgctgcacgcttgtgtttatactcttactgaatcgcactttctgcgatggcacacaggatatgatctacaacaaaggaggaatctgatatgacttattcttataaaacaaaaggaacctgttccacacagatcgacttagaactggacggaaacgttgttcataacgtaaaattcaccggcggctgcaacggcaacctgcaggcaatcccaaaattagtggaaggccttaccgtggaacaggtggaagaaaaaatcggcggcatccgctgtggcggacgtcctacttcctgcggcgaccagcttgcaaaagcgtgccgtgaagcattagaggcgtcccaaaacgcttaagcattgaaaaagacaggctgcaaaacacagcctgccttttcttttttacgatgactaaatattcacgaaacatacattccatgcttcccctttttcatcatggctcctgcagtaccggctgtatctgttttccctgcagcgccgcctcgattgtttccggaagcagttccatcttcgcgaccatggaattcggcttgctcttataattatcctgtccaaatggcacaaaataaatatttttcatattcatcagcataccgatatttttaaaaccggctccaagggcatcgtttgtggaaatcgcaatgacaagcggtttaccgttgcgcatatgcgcctttgccgccatcagcaccggcgtatcgacgattcccccggtcagttttgccgcagtatttccggtacacggcgcgatcaccataatatcaaggaaattgttcggtccgatcggctccgccgcacagatggaacgtatcccttcatttcccgtgatctcacagatcccctccacatattctttggcactgccaaacctggtatcgcaggtctgtgcattgaatgaaaaaatcgggatcacatttgcccccatctcacagagatgttccaccgcttttctcgcctttgcaaatgtacagaaagatcctgtgattccaaaaccgatattatacttatcaaaatccatctgacatttccccctgtttttccttcaaaataaaccgctctacggagcgttccaaaatatacgcactctctttcggcgcatattttcccgggattccaagcacatggtccgcatggatgccgtattccctcgcacatgcaaaatctgtaccgccctccccggaggcaatatccacaatatatgcatctcttggaagttcccggataatcttttccgtgaccacaagcgccggaaccgtattgacaaccatcgccgcccccattgcctcctccggtccaaacgcaaaatccaccgcataaaaaccatcaccttttgcctctttgcgtgcttccttccttctcgcaagcacagtcacacgcgcgccaagcgccccaagtctctttgcaatcgcttttccacaatatccgtatcccgtcacaagcacttttgcctcatcaatattatacggacttttttccacaagctctgcgatcgttccctccgccgtcgccacggcattttcctccgtcacaaccgtatcttccataaaatccagaaaatgaatgtctcttccggttaaaagttccctctgctctgtagaaaagcatcctcccatcaccagtgttttcttttccagatttttatttaatatatcataaaagatctcctgctccggcactttctgcaccggaattggaaggatcagtacatctgccttatccagaaaacgtttcagcttctctaactgctgcaatgccgtctcacggtttctgatatcgaggcagcgcacattatgacctttctttgtcagtatctcagcaagatacacctgacgcatatcgctgatcagaagaattgtctgtctgtccatgcaaactcctttacgctcccttcacattattatatgaaggttctgtttctgccgttccagattcgtcttcccgttcctgtcaaactttcattgaactttgggttttgagtctcatgtcaaacattttttccatttttgtttttattttctgtgctttttgtattttctgaatttttcattaattttacgcgatttttaattatcttttattttttttacattttatctattttcttattgacaaacatatttttatcagatataatcaaattacaaaataacaaaagagatacgaaagaaaaacaaaaacggttgcagagacgaagcagccagaaaggaaggtacagaccaccagagggataatgatttaccctagacgatactaagaaagagaggtacaaaccaccagaaagataacgatttaccccaaacgatactaagaaagagaggtacgaaccaccgaaaacataagcgcattcgttttttcattcaaaagaggaaagaaaacatgacggtcctaagaaaggatttatgaatcagtatcagacgagattctcagatatgatacgatatcaggagtcataagaataacagatccggattgaagataaagcggagaagtacaaacgaatctgagacaagctcagaaaaatacagatgaattgaggtatagtcccatggacgaaatagtttagaaggcggcatcgcatgaatgaattccatacggtgtcgccttcattgtgtgtcacagcattttggactgtacgctgcatatactctcctgcagacggaaataaaattccgccgcaggtttctttttttataactgggtcactacaaaaatatcatagatcgcacggatcgcattttcaaaatctgcattgctgacaccaatgataatgttcaactcagaagatccctgatcgatcatcttaacattgatgtttgcatgtgccagtgcggagaaaattcttcctgctgttccacgggtagatttcataccgcgtccaacgactgcgatcaatgccagatctccctctaactcaatgctgtccggttttgcaagacgatggatcgcagaaatcacagactgctctttgccctcaaattccggctgatgcacaaagatcgtcatcgtatcgataccggatggcatatgctcaaatgaaattccattttcctcaaatgcggataaaacttttcttccaaaaccaacttcggagttcatcatatccttatcaatattgacagaaacaaaacctttctttccggcgatacccgtgatcgtgtatttcgactgatgacaggtactctcaacaatccaggttcctgcatcttccggcgcattggtgttacggatattgattggaataccggctttgcggaccgggaataccgcatcctcatgcagtacgcttgctcccatgtaagaaagctctcttaactcgcggtaagtgatcgtcttgatcgtttctggatggtcgatgatccttggatctgcaaccaggaaaccggatacgtctgtccagttctcataacaggttgcatgtacggctcttgatacgatagatccggtgatatcagaaccgcctcttgaaaatgtgcggacacttccgtccggattagcaccgtaaaatcctggaattactgcgcgctcgatctttgcaagacgtttactgagtaccttatctgtcttttctgcatcaaagtttccctctttatcaaagaaaataacttctgcagcatctacaaactcatagccaaggtaattcgccatgatgataccatttaaatattctccacgggaagctgcgtaatccacaccggctttatttttaaaattctctgcgattttcttgaactcatcttctaacgataatttcaaattcagaccattgataattgtgtcatagcggtccttgatcttcatgagcggcacacggaaatcttcatctgcctccaccaggtcataacatgcgtataacatatcagtaaccttggtatctttggaatttctttttcccggtgcactcggaactacatatcttctctctttatctgcgttgataattttaccaacctttgcaaactgttctgcacttgcaagagagctgccgccaaatttcacaactttaatcattttcttctgaacctccacttactttcgcgtgtaagaaaacacccgatactatccatataatgaatatatattatcataaatgcagtttccgtcaaatgatttttccgatttttagttccatggaatcaaaaatttttgtatttttctatattatgtcaacttttcattacctgtacttataagtactttaaattcaggtaataccaaccggtcctatcagcacttcgcgcgctacaaaaagcgacagatccggtctcgtcgccatcttccatttcaccagtgtaagctgcatatctgtgatttcaattccggtaatgccatacggatgcacgcagctcccggcattcaggtacagactgccgtctgccggcagccttggacggtgggaatgtccggccgccagatagcagtcatgctcttttgtccagttatctaaacatttttcatattttaaggtctttttataattccgcgccgcactcgtcggatcactgacgccaaaacgctctaacggtttccagaaataccgcaccagaaaacgggataatttccagcagactgagttaaaaaaatctgcctgatgcccgtggatcatgcagatatccctgcctccctcacagttatctaagatcattgcttcccctaacatgcctttcatttccatattgtgatttccgtaaatgcggtatatccggcactgtttctgcagtgtttcaaaccggcagtagacatcctgatgactctcctcaatgcgggaaagatgcctgttttcccacaattcttccccgtcaccgagttcaaaataggtgaaaccatgcgcgatatagtagtttaacgccgccatatacagatgctggtttctcaagaaattatcatttgcccctccctctccccggtggcagtcgctgatgatgatataacggctgcaactgttaagcggaagatggactgcttctgaaagcgctttatcgatccgcatctgacaggaaaagggcggatatcttttcttattttccatgcttccatccccgcatccgaaacgcatgtttcaaacaccacggaagctgatagtataaaaataaaagacggtcaggtgcagcaataaacggatgtgtgaacagacggtaaaggaaacagcagaaacagttccaagcctgcaccatgcagcgccaaacggacgcacagaatttgtgtttcatacagaaatccattctgacataaacttcattacggcagatccggtatttattccccggtatttttcctttcgcccgctttaatccctcaaaaaatgcttctgccatgcattcattctgaaaccgtattgtcgtcaccaatatcagatccgatggtctcgaaaatgtccccatcccaaatccggtcagccaccagtgccgcttctgcaggaaataaacttttttccgcctgcggtctagcctgcactggataaacggcatatcctgatcttccaccgcctcaaaatgggcgatcctgtaatatcgttccgggacgacctttcccgcatgatatacgccaacctctcctccggtattgatgccatactgccccttccagaattcgatcagccaggtttcgccagcataatcaaaatagataggcagtgcatcaaacaccatgcctgctcccactgctgccctgtcgtaaagcgcctcatacccctgttttctctgccacgcatcttccctcgacgtgaacacgtcttcacacggcacataacaaaagccgaatggttctgcgagttcattcagaagctgaattttctctgcatcacacatccggcgtatttttctcttacttttttctctttttaccgtgatgatcactgctgcaatcagtaaaacaagcaggatcaccacaatacatccaatttttatcacattaaaatctggcatttttccctcctgcatatttttttcagaaattcacatcctgtactataagatatgcagggaaaaatggtttggcatcagaatcagcgcctatacatacttctttaaagtagcacgcactgcgcccaccccggcgatcagttctttaaaatactgcaccgtcagtccggcaagaccggcctcataaagatccacgccaaagattgctctgtttgtcagcaatggccggatcatttcttccacatctgtatcaccaaatttgataccggcaacgaccgggcagaccgtctcaagcagtgggtccgggcttaactcaaatttttcgccattatcatcaactgccatgagataccgaagccatcccgcaaataccagtggaatgagttttaagtttttgatatccttatcttttgatgcaagataatttttcacagtttctccaaagcggatcgcaagtttctgtgaagtatctgtggcaatacgctgtggtgtatccggcataaacggatttggtatgcggacatttaacacggtatcaataaactctttcggatcaaggatacccggatccacaacgaccggaagtccctcggtatatccgattctctccaccattttccgaagctctgcatctttcatttcatcggagatctttgtgtagccaagtagacagccaaacactgcaagagccgtgtgaagtgggttcaagcaggtgcagactttcattttttccaccttgtcaacggttgcgcggtcggtaaacatgatgccgcccttttccagctccgggcgtccgttcgggaaccagtcctcaatcactaaatattcacattcctctgcattcacaaatggagctacataggtgtttttggatgtaacgaccggatcaagcccatcgatctcatctttctttaagatctcttccacggaagcatccggtctcggcgtgatcttatcgatcatagaccatgggaacgaaaccttttccctgtcattaacatagcttacaaactctttctctgccagaccgttttctgcccacttttcggcaaatgtatggattgccgcatataatttatccccgttatgggagcaattgtccatggataccatggcgatcggaagctgtccgtttttaaaacgtgtgtataaaagagatgcaacttttccgatatagcttgcaggtttctccgggccggctgcaaaatcggcagcgactgccggaagcagttctccttttccgtttaccagactgtatcccttttctgtgatggtaaaggataccatctgcaaggactgtttgcagaaaatctcttttaatctgccatactcgccctcgttttccgaatcgaggatacaggactccacaacagaaccgacaactgttttttcgacgcttccatctgcctttaatgtgacaagaatggaataatcatcatgcggacggttcattttttcaatgatctcataatcaaaaccttccgctacgatcaggcctgtttccatttcccctctgtttaagatattctgcattacatttgcctgaaatgcacggaaaatatttcctgcaccaaagtgaatccagcacggattttctctggttgcctctgttactgctgcacggtcaaactgcggaagctgatatccctttgcttcccactgtgccctgtcttttaaaccaagtgtacttaattccatagcttttcctttctccattgttcaacgttttttgatatgtttattataagtgaatccccttaagacatccaatagagttgcttgttgttcacattgcaaaaattgcgattctgtggtaaattttttatatcagatcgtcactttttccttatatttgaaatatttcagaggattttaccatgcgcagacagttacagtctccttttaatgaacgacagtatatgctgtccaaagattttgaaatttactattataatgacaaccacttttatggcgtgacagatcacacccacgattactatgaattctatttttttctggagggaaatgtaacgatctccattgaaaaggaacatcatcatctgaaaccgggggatatggtcttcattcccccgggtattcaccaccatgtgtccagtgtgggggaaacacttccctatcagcgttttgttttctggatcagtcaggattactgtcagaaactgaaagaattgtccaaagactatgtttatctgatcgaacatgcacagaatacccatcattttatttatcactatgatgtcgtggctttcaatgcgctttccgcaaagattttccggctgatcgaggagatccatgcggaccgttttggaaaagctgccaagatcgagctctgcgtgaacgatctgatgctccacatcaaccgggctgtctatgaggcagaacatcctgcagcccgcaaagatgcctctggtctgtatgacggcatcctgcaatacattgagtcccatctggatgaggatctctccttagacagcctctccaaagctttttttgtgagcaaataccatatttcccatatttttaaggataacttcgggatctccatccatcagtatattactaaaaaaaggttatccatgtgcagggatgccattctcagcaatgaaaatatcacaaaaatctacctgatgtacggattcaaagattacaccagtttttttcgtgcattcaaaaaagagtatggcatctcacccaaagaatataaggaactttatgcgcagaaaccgcagtagaatctaccgctctgttttagtgttagagggaacccatgggcatttttttgcaacttcgctgttataatgctccaattccctcatctgtgctacgatatggttcatatccatgcgctccaccaatttttcaatgatttccacaccctcttttgcaagtgtttccctcgctgcttcatctgcaatgaccggtgtactcatgtggtcttttttctcgccaaaataataaccgatcgcagcactctgatatgccagtccgaaaatatcctcaaatccggcacaggactgcggctcgttatgcgcatactccgttgtgagcggcacgtcacttaatcggttcattttctgataagctcccactgtaattgcgtggaaactgtccattgatgtaaaaatatcccttgcatttttcatcatctgcatggtgaggtccatatataaaatcggcactccggtctcatcaaagaaatcccgcaccatcggactgcatgtcatatgtgccgggccgtgaaaactgatgtagatctggcgtttgaatccctggcgcaacaggctgtttgccaccgccatcaaatagtcgattccttcccgcacactcacctggacggttcccctgccgcttgccgttgcgcctgcgtaaaaatacggaagtcctgtcaataccagcccgtcacacgcctctgccatctccagtgcaaatgcctcactgatggtggtttctgaatccagtggaaatcccccgtgcatctctaccgttccgaccggtacaatgataatgtcatttctggaaagatattcttccacctcatcatttaacattctaggtaatattcttgttctcatatgtttcctcctgtttttgagggatgtggtatgttttcggctatccctcttttttcttataagtgaaataatttttctgcatttgtacggcagattttttcataggcactccggctgagtcttcctgcgtgttcctgctcatccagccagtttccaagcggaaatgtcatttcacaatttgccatatctgttccaaacagcaaccggtcctgatatttttccagaaaagccagcccaaattcttcgtcacgcatgattgcacatccgccactgtttgcggacagatctccatataaattttcataggtttcaaacagatatggcagtctgccgccgggacatacagctccctctccccatttcatccgttcctttggggtcgccggtgcatcttttgaaatttcatgccagaatggctgactgtgcccgatgaactttaatcctttataacgctttaaattttcctccagcagcgggagccccggcccgtccacaaccccatactgaaagccctctttcggactcatgtgaaaaagaacaggtaattttaattcttctgccacctcaaatacactctgtaaaaatggagcatccagcctctggtttaccatcagttccccgattccgaccgcaccgctctctttacaggctaagatccgtttatacacatctgtctgtttttttgcatccacattgcacatccagtggaacttcttggggaactgttcacagatgcgtttacactcctcatttgctgcaaccaggatctgctcattttcctgttcgccggaagataacacgattccctgttcaattccaagttcctctaagtgcggcagcatctgtgccgcactggaaaggaacatggtatctgttttcggatactgctgtaatgtcagatgaagatgaatatcaatttttttcaatctaatctcctctttactattcacgtctttgttttaattccgcatacatttctttggtctgttccttatccagattaaagattgcgccgataccaatgagttccagcacacaggtcagcaccgggatcaatgccactaacatgtagatattgtttatggttgcatctgactgcaccacattatttccagaaatatatccgatcgcctggagtccgaaggaaacacctgcggaagcaatggtggaaccgattttacggctgaacgtataaagggaatacatcgagccatcacttctctcatggaacttccactcactgtaatccagacagtctgtgacaagcgcccagatcagcatggtaaatacggtctgtccgatcattgccagtacattcagtaccgaataaacataaacgtttggtatttttacggcaaaaatgattacactgagcacggtactgctgattacgccaaacatcaatgtcgttttctttccaaactttgcaaccagttttggcacaagcgggaaacagatgataatgatcggcacacttgcaagactaagcagagtcattgcagaggtatttccatagtactctttgaatacataacttctaatctggtttgaaccggtgatatagagcatacttccaatggttgcaaccatgacaccgatcagtggcctattttttacgactgctttcaacacatttccataattgaacttttctgtattctgtttcttttcctcacgcacacgctctgtcgttaaatgtaacagcaggcagtagcagaccacacttaaaattccaaaaataactgccagaagtgtaaatctttccgggataatgttgctttcgctgtcaaaacagactaccggcacaaaggataacgctgcaattcccacaaatgttccgccaagacttcttgcccttgagagtttactccggtcaatcggatctgtgctgaccacacttgccatcgcaccaaacggcatggaagttccggtatagctcattccatataagacatacacaaaagcgacccacgcatgaagtgcaacaccttcaaacggcactttggaaaaacaaagcacacctgacaacgctagcggtatcataaaaattttaatccacggtttgaatttatctcctgattttccaagcatccaacggtccggaaaagaacccatgatcgggtcatttactgcatcccagagtctcgctgcaaggaacagggaacccatccacgccggactgattcccagcacataagtacaaaacgtcaaaaaatatgcgtctacaaataaattgacaaaactgcccgccatatctccaaacacatatccgatctcatccctttttgaaaagggtcttacatttctttcattcataaatttttctccttctggtatttgtacgcgcgcattggttttgtgtctgtacatttcacaagaaccgatatccttatgatacatttgctttattgcaatttaaattgcatttatactaaaatacattgcatatcttacatttattgtgctataatatttgtaggattgtataaatataacaaatcagaacaggagtttttatgaaatatagccaaatgaaacgttttttaatggaacataaggattcgatgaagcctccgtatatttccacgctcgatggcatcctgactgccggtggggaattgatcggataccaggaactggaaatggacagcccctatctggatgtgcatgaggataccagttacacgaaagactatgtaaccctccacagccacgagttttacgaacttcttttctgccgcagtggaaacttgcaatatctcattggaaacacccgttaccagatccgcaaaaatgatatcatcctcgttccccccggcaccagccaccgccctttatttttagagcagcttcgggaaccctatcagagaaccgtactctggatcaacaacgatttttttgagacctgtaagcagaacttctttgcggatacaggctcctcccaatatgcaccacaaaagcagctcccctatgtcatccgcccggaaggaacactcttaaaccagatcgaccagcttctggctgcactgttgtacgagggttccaccatgcgtcttggaagcgagctctaccgcatggggctttttctgcagttgttctgtctgttttaccgtatgaacgaccatccgcagtcagacatccccaaaccggagaatacaggcctgttagaccagattctcaactacattgaattgcatttatccgaagacctcagcctcgcatctatttcagcgcagtttatggtaagccagtcgacagtaagccagctttttaaaaagcagcttgacaccggcttttacaaaatcgttacccagcggagactgatcgaatctaaaaatctgatcaattccggctttccattgaaagaagttgccgaacagtgcggcttttgtgattattctgttttttacaaagcgtttgtgaaagaatatggcatctctccacgcagcttccggacccgtgaaaaagaaacgcatgatttttactgatgcggattcaggtgtcaaaaggtaacttcagattttttgactggcaaataatgcccttttgataaccagagataagcatacaaaaatccgcggcatatgccacggacttttccataatacaagggactgccatacggcagtccctaattatgcatattttatacttatttatttccatccagcttatcgagcatatcccacacgccgagcatatacataatacccagtgcgcggtcgtataagccataccccggacgaacattgcccggcttttcaccccagaggtggcgtccatgatccggacggatataaccctcaaatccgcagtcatggtatgcttttaaaatgtcaaggattccggtatccccatcacagtcacgatgagaagcctccgaaaaatctccattcggaaaatgttttacattgcggatgtgcgcaaatgcaatgcggtcacaatgcttgcggacaatatctgccacattgtttctcgggtcggcattcaaagaccctgagcacagtgtcagacagttgtacgggctgtcaaccatctttaagaaacggtcaatattttcttcacaggtcagaagacgcggaagtccgaaaatatcccatggcggatcatccatgtggattgccattttgatatcgcattctttacaggtcggcataagcgcctcaagaaaatattttaagttttcccacaatacttcttttgtcaccggcttgtaagctgcaaagagctcgtccagtttctccatacgttccggctcccagcctggaaatgtcattccatgtaaattatttaaaatatagtctgccatttccttcggatcatcatggatcttgcctgcttcataataaagtgctgtcgaaccatctcctaccggatgaaataaatccgtgcgcgtccagtcaaagatcggcataaaattatagcagataaccttgacaccgaatttggaaaggttcttaattgtctggatgtagttttcaatatactggtcacggctcggaagtccgatcttgatatcatcatgtacattgacagattccacaacgtccatattaaaaccatatggctcaagctgtttctgcacttctgcaatctcttctaccgtccacacttctcccggcagtttatgatgcagtgcccacacgatgctcgtcacacctggaatctgtttgatatcagcaaggctgatcttgtcattaccctcgccataccagcggaaacccatctgcattggcatatctttttcccccttaatcttgataattgcattatagcatgtacatttttttactggcaattcaagttaattgctgtttttattgcaaatcttgcgattccgttacttttggcatttttcgaatcgtccggaatacccctgtgtatttctgctgttccaccatgcggtctgaaaacgtactctaccgcatggggctttttctgcagctgttctatctgctttaacgaatgaatgatccgttgaattgcatttagcagaaggcttcaatctacatgttttatcttgccagcagtcctctcgcaaagtaatccgccatcgcaagtgcctgctgctctacgtcccggaacacatcaatgctctgctcatactctccattgacctggtgctcgatctcctccctggtcagatccagatgatttaacagcatatttctggtttccctgctctcaaagtacggattgtaattcgcaaaaagagctgccatctgattggcattgcggtaccactccttcaccagcgcatcataatcagacatattttttgccttcaatgcctgaatgatctgtccggcgatctcaatatgctccgtcagaagattgcggagctgtctggtcgttgcgatcggaagataccttgcaaatacatccgtgatctcgtctgcggtctcaagcagccgttcttccactgcctgctggtctgcattgtctgcgactgcactcatcaggtacattctcgtccagtaaacatgatttaaccatgcaagacgcatatcctcgttgagacggaggatggaatcctcacgctctgattcggtctcgttgctgcctccggcatttcctgttcctcctcccatgtttcctcccatgctgcctgtgccgccgctcatatgcccgcttccggtgtttcctgttcctcctcccatatttccacttccagcgtttcctgttcctcctcccatgtttccgcctcccggattctgcggaggcacatatccctctcccgggcagataaaaagcttcatcccgatctggagattatatggattgactcccggatttccaagaatcagttccgtcactgtcgtgtgatactgtctcgataatttatacagggaatcgcctgcctgtatcgtatgcacaattttgttctgacaatacatatctttatttccaaccataactttttcatattatgatatgaaatacaaaaaaaaatgtgaaataccatttctgagatttcacatttcgcattatttttctaccagaattcgggtggcaactatagttttcagtttttgactgccaaattacacatctgtcatggataccccccatatttacaacagcgttgcaaaaatcggtgcggcgattaccgtcagaatacctgccaccgcaatggaaagactgctcatcgcgccttcgatttctccaagttccaatgcctttgctgtgccgagtgcatgtgcggaggatccgatcgcaattccctttgccaccgactcttcaattttgaaaacacggcagatcgtttctgctaacacatttccgatgataccggtgataatgatgaccgcaaccgtgatcgtgacataaccgccaagttcatccgagattcccattccgatcgccgttgtgatcgattttggaagaagcgtgacatactgcgcatggtcaaagtggaataacagtgataagaccagcacacagatcacacttgtcagaacaccggagatcaatcctgcaaaaatcgccgcaacattctgtttcagcagttcgaactgctcataaagcgggatcgctaaacataccgttgccggagtcagaaggtaacttaagtattttgcgccctcattataactctcatatggaatatggaacgcaaccagaaaaacgatcacggcaacgatcgagatcagaagcggattaaacactgccagctttaattttttctttaaaaacacgcccagctcatatgccaaaatgctgatcgcaacaccaaaaaatacggaatcacttaaaaactctttcattgctgtgctcctttctttttccctctgcgcatcacaaattgtgtcacatgaccggacacgatcataaccacgatcgttgataccaccatgatcaccacgatctgtacacagatcggacgcagtgcatcccatgcatcaataagtcctgcacctgccggaataaacattaacggcatgatctcgatcatgaactttccggcatctttgactgctgcaagcggaaggagtcttgtttccagtgcaataaataagagaaccagcccataaatacttgccggtaccggaaacgggagcacatattttaacagctctcccagaaatgaaaacaacaggatgatcataaattgtctcaagtacttcataaaatatccttttcttcagaggcttctctgaaattttaattttcagccggatataatcatagcactttttgttagaatatcaaccttttctgttactaattatccacttgtattcttttttaaacatcagatttgttctccagtttatgacgtgccggattttctaaaacttccccggacgcgtcaaagcaggaaccgtgacagggacactcaaaagtctgttcttttgcattccagtgcagaacacaccccatatgggtgcacctgttttttacacgcggttttaaaattcccttcatcgcctcccacatattaattgcaagctgtggctttaaaatacctcgcgacggattaaaaatggctgcaaattcattttcccttccctgcacaagatccgaaagaacaattgctgagatcattgcgcccgtcatcccccattttccaaatccgcccgccacaaaaagatccggtgtcgatgaggaataattgccgatataaggcagtccgtctaacgtcatacagtcctgcgccgcccactgcccggtaatttctgcttccggaaaatagagttttgcctgttcccttaatttttcaaatccatccggctcttttccggtgcggtgggtgattccgcctaacagcaatgtatcctcgtaaccgcgcagggaaagtccgcccttttttgcctccagataaatgccatccggtatttccgtattttttaaggaaagcacataggaacgctcctggtacagtttcacaaaatagctgccgcgccggttgataaacgggaaatgtgtcgccacgatcactttttccgccgccaccgacccgtgatccgtcaacgcaaaatattccgtcatttcccgcacgggggaatgttcatagatgttcagattttttgcaatggctgccacaaattttaacggatgaaactgcgcctgattcggaaatcgtactgcccccgcagtctcaaatggcagatccacctgccctacatattctgccggaaatccaagctgcatgactgccgccgcttcccgtttcagtttttccgcatccatacggtcaaacacatacgaatcgacttccttcatatcacagtcgatgagccaccccaggtctttgtagcgctttaatgcaagttcattggcgcgaagataaccgtctgcgatctctcttcccgccctgctgatcagactgtcataaatcagcccgtgctgtgatgtgatctttgctgtcgtatttccggtcacgccgctgcagatggtatctgcctctaacagacagtaatccacccctgaccgctgcaaaaaataggcgcacagaatgcccgccatccccccgccaatgatcagtactttcgttcggatatcttttgtcaatgtatgaaactccggcagttctgccgtctttttccagattgattccatgatttctcctgacttttttagtcagtatgcgtcacaatattaaattttattcaggcagaacggattgaagctgcgtcctgcgctcctcccattcctcatagaagtcacgcccgctctcatatggacggaaaaagaaactctgtaaaaacatcatgcagaccgttttcttttcatcctcagtattcagccggcttaaatattcctgcatattcttttttaagctgtgccactctgccaaaaactgctgatatcgttttaactgcggcgtatctaaccatttttccactttgattttcgttttgccgcgttcacaggcaccactctgtagaaaataggaaacaccctgctcctcataaattcttcccagaggaaatagtctgcagatgcccggacggtatgcatggatactgcaccttcccacctcatttaaaaatacacaggtatccgtctgttcctgcattttcaaatgcggcacgataagcccctcttccacatgaagtcctacacaggactgcatcagttgttcaaatcccatcccaagctctgtctctaatcttttacagtcatacggatcgactaaaactgtatctcccatctgttcacagcagctatgacagccctcgcagtcactgcagccgacacggaccatatcatgtacgccgtatatttttccatctgaaatttcattgatatcctgtaacatatatgatattcctctcttatatcctccgccggagacacgcagcctgaaatgtgaaaaatttaattcaaagtcctgttttataaattttgatcaaagaacgcaagcatgttttcactccacatttttgcagaagtatgatatccaagcccgattccatgatctccggtcggataaacctcgcacagatgctttacgcctgctttttccagtgcttcattcaaacgcatggtattgcttgcaggtacacagccatcgtccgcattggcataggcataagtcatcggataatccgacgtgatatggaactcaaccgataatttttcacgaagtcccggtttctcatttgtattataaatataacttccctcgtgatattctgaagtaaagctgatgaccggatataataatcctactgcgtccggtctggcagaaatttttctatattgttctaccatatcagctttctggaattttgcaaggttttccagtacattttcctttaattcctcatggagcagcgcctcactcgcacagagatgaccgcctgcggatgcgcccacgatcacgatccggttcggatccacctgatattccgccgcatgtgcccgcacatacataaccgctcttgcaagatccatctgtggcagcggatagtagttcggacggatccggtagcataaaataaatgccttatagccgccatcgcgttccatgcgctgtgcaggctgaagtccctcattatagaaggataccatctcatagccgccgcccggacagaggatcaccgccggttttaagcctgatgtatttcttttttccttggaaaccgccacagattcataaggcgggatggaatcactgccagcagtatgcgcaaatgcctcgttgtccacagccggatcaccggtaaacagccagacaccttcctccatatttaaatctgcatccgggatcccgtttttccagtgtgacattttatcgcctgccgatgcatcatcattttctccccacagtggaatgtacttaaatttctttgtctccgccgtttctttgatcaggtttgcacattctaaaaaggcatccgctaaaaatggtgctccccactccatcgtttcttccttctcaatctgtgccatcgtatgatccctgtgttccaccggtacgcgtgccataaaacaggttggaaacagatttccgactgcacgtccgaccggctctgtatttaaaatttcgttcatggtgttgttttttgtaaacatgtgactgcctctctttatactgattttttcaatgtattgattcctgcttcacatatgataatgtgagatctgtctttatcaaaacactgactattacgaaaaaaaatctgatgatacttttaatatacatcagatttttcgtgctgggtactagaaaaactatattatttttgcatggagaatttgtctaagccaggctcttacagattgtgtccatattgtagtccgggacagatttttgtttcatttaattattacgtattttcagatactaaccagctttttcatttcgccattactgattccaacctcaagaatgttcatctccactgcctcccattcttctgattcttttacctctgatacaatcctgtcaagctctataagccgttcatcctttaccttaatttctggattatctaatcgtgtatctttcatatattgtaacaaacttatcaactctttggaaccatttttacttgccatatttaagaaaatttttgttgtaccatcctcaagatgtaatcctgttatttcttcacatcatcatgcatattattttccatttccatattgatctgcctattatcaacggttttcccccacgcatccaaacgtatcgccctttttccgtaacgatttaaaataacctgctctaccttaacctcctccatcttaatatccggttcatctaaaataatacttaatgtattttcataagcctttctatttttcattacagtccatttgataaccatattgatttacttttgaattgtatttttgactattaagaactgcattcataatatactacatcaaaaaacacatctcaatcattttattatgaaaaatttataaaccactaccacaaaaaaataccggataaagacgcagttccaaaactttctgcgttctttatccgatatctatcattctgctatgttttccatcgacttatctataaagcctaaaaactttctgtctcaattaatcctcaaacggaataactgctccatcataagtatcgttaatgaatttcttgatgtcatcagattttaatacttttacaagtgcctggatgccagggttgttctcgtttccttcttttacagcgatgacatttacatatgtttttgctgcctcagaatcagatgtctcgtatgctaaggaatcctgtgctacagagtaacctgcctgtaatgcgtagttaccgtttaatacaacgaatgcaacttccggtgccactcttgctacctgttctgctgcgagctcttcgatctttatgttgtgcgggttctcagcgatatcgttgacagttgcctctaagccggcgccgtcttttaaagtgatgatgccgttatcctgtaacagtaataatgctcttgcctcgtttgtggtatcgtttggtactgcgatcgtatcgccgtctgctaactcagagagatctttctttgttcccggataaattccgaatggctcgtagtgaatgccgcctgcattgacaaggtgtgtacctttctctgcgttgaagttctctaagtaaggaatgtgctggaagtagtttgcgtcgaactcgccgctctctactacctcgtttggaagtacgtaatcatcaaaaattgtgatctctaagtcccatccctgatctgcaaggatcttctttgcttcctctaagatctctgcatgtggtgttgcagaagctgctacggtaatcgtgccgccctctgttgtctgtgtgtcagctacgctctcggatgcttcactttctgctgcagtggtgtctgcaactgctgcatcatttgtttctgctgcatcgtttgtttctgctgctgcgttattatctgcagctgcattgcctgctgtgttgctgctgccgcatcctgcgaatgcagatacagctaaaacgcctgctaagattgtggtaagtactctttttttcataatatgaatcctccttgttttgcggagcaaaatgcgaaccctctggtgagcagaggattttactccttgttttgcggagcaaaatgcgactgctatgcatgctatgctcaatagcttgcatagcatgtgcctcttgcatggagcaatgcccaacacattgggcaggattttactccttgtttatacaaatgttaaaaaacattgtttacgtttattttctgcgatctaaattgctcgcaagcttcatgccgatcgtctggaatatctggaataaaattaccagtaaaataaccgttacgatcatgatatcggtctgccatctggtataaccatagcggattgcgatatctccaagtccaccgccgccgacggttcccgccattgcggaatatcctaaaattgttccaagtgaaatggttgcccctacgatcagggatgtacgcgcttccaccagcataactttcgttacgatggtaaaattggatgctcccatggaacgcgctgcctcaatgacacctgcgtccacttcctttaaagaagattccaccattcgtgcaatatatggtgctgctgctatgacaagcggaacgatcgtcgctgtcggtccatagcttcttccgatcagaaatcttgtaaacggaatcagcacgatcagtaaaatcaaaaacggtacacttcggatcaggttcgcgatcacgtctaataccttgtaaactgctgcgttcggatgaattccatctttgtcagtgaccgttaaaagaattcccatcggaagtccgatcacataaccgatcagtgtcgatgtcaatgtcatataaagtgtgtccttgatgccctctaacagcatcatgataatctgctcattccacatcttcggtcacctcctcaactgcgagtcctttttcttttaaatattcctcaatatccacctgtaaatgtctatcctccggaagtcctaaaatcatttctcccttggctacaccgccgacattcttggtgtctgcccttaaaatattgaccggtgttttaaactgtaagatcatgtttgcaatgaccggctcaaatgcggaattttcagaaaagacgattcggatctttttatctccctgcatgcgctcctgaactgcatttgccaatggtgcattgttattccccggctgatcccttaagatcagttcctttgcagctttggatttcggatgggaaaagatatcctccacaagtccgtcttccactaacacaccatgttcaatgatcgccacatggctgcagatctcacggatcactgacatctgatgtgtgatgatcacgatcgtgatgccaagtttttcattgatctcttttagcagcgataggatcgaagcggttgtctgtggatctaatgcgctggtcgcctcatcgcaaagtaaaatcttcggatcggaagcaagtgctcttgcgatcgcaactctctgtctctgtcctccggaaagctgtgccggatatgccttttctttttcagaaaggccaaccgtttttaacagttctctcgctctttctctcgcctctttctttttcttttcctgaatctgcatcgggaaacatacattgtcaagtacactcttttgcatcagaagattaaaattctgaaaaatcatcgcaatatcgctgcgctgccctcttaattccttctctgtcaatgctcctaattcctgaccctcgatcagcacctgaccttctgtcggtttctctaagaaatttaagcatcgtaccagtgtactttttccagctcccgacataccgatgattccgtagatatcgccctgctccaccgtcagattgatatcacttaatgcctcaacggtcactcccttttgttcaaaccttttatagagatgtctgacctcaattgctgccatacatgttctcctttcttcctgccctatgtgagcacctgtctgcactccgcgctccatattaacacaaattttattttaaggcaaaaaaacagatgctccctcgcggaaacatctgttttacattttctatcaacgcataaaatcagatatctttccgcacacgaaatcgtcccatacagcacatacacatcatgccgcacatggatcctgtcatcatcattctgtctgctgttgtataggtcttaatttctgtacgcatatctgatctctcctttctcctactgctctgtcttgatttgatagtccttattataacaggtagttacagaaagtgttaatattggaaaccttgagttggttataggtttcacctataactgattacatcacattttccctgtatttttttaattcttcgatatagatctccccgatatggctgacttttgcccctttccgcttcacatagccaatgcgcattttctccgtttcctttaacgggattgccatatagtcactgccgtttagttcctcacagataattccggaacagagcgtataggcatttaatccaatcatcagattcagaagcgtggcacggtcatttgccttgatgagtcttttataatcataagtactcttcatttcctccgccagataaagcgaatggtgttcgccctgatcaaaagaaagacatggatacgcatcgagttcttccatcgagatcacttcctgttttgccagcggatgcccggaccatagatagacataagtatcgcaggaaaacagttcaataaattccaatccgtgttctctgatgatcttattcatgactttctcattgaaatcattcagatataaaaccccgatctcactccggaaattttttacattttcaagtacatcataagtggtcgtctcatggactgcaaattcatactgttccattccggcctgttttaccgtctccacaaatgccttgactgcaaatgtatagtgctgcatggatacgctgaacttttctttgacctgcttgtcgatatagcgggaagtgagcagtgtaaactgctccgtgacctgtcttgcatatcctaaaaactcttccccctccggtgtcaccaggattccccggttagaacgcacaaacagatcaaacccgatctccgtttcaagttcccggatcgtctctgagagactcggctgggaaagaaatagtgtctttgccgcctcattcatcgatccgcagtccgcgatcgtcaatgcgtattttaactgctgcagtgtcatctgatcctccctttaaccttccacatccccggtctgttttaaatatctcttcttgctcgaaaaacctcttcccgacacttcactgactttattgataatcacaaaggcatccgggtctacttcatgaatcagtttttccgttttggcaagctcacgcatggataccacggtcagaagcatcatcgtgttatttcttaagaaccctgtctcgctgtttaacagtgtcacaccgcggtcaatatcttttaataccgctgtgcggatctcatcaatatggctgctgacgaccttgatctgcattttcgtagttccaagcatcagacatttatccagcactgcgctgtatacgatcacaagcagaatgccatagagtacctgttcacctgtgctgtgaaatacctgaaggagtaagatcagcatatcaaatacatagatggaacttgacaccggaatcttaaaatacttatttaagatcagcggcggaatatccatgccgcccgtggaagcccccatccggatgacaagtccgatcgctgccccgatacaaataccgccaaaaacagtacacaagatcaggtcatcggtaatccggtaacccccaagcagccttgtgatcagttcgagtgcaatcgggtagctgaatgtgctgacaatcgtatttgccgcaaacttccacccgaatgcaaaaaatccgatcagaaacataatggtattaaatacaaatacaaacacggtgaccggcgtgtggaaaacatcattgacaaacagtgcgataccggtcgttccaccggtgatcagcccgcttggcagaataaacattgcaattccaaatgcataaatgcagtttccaaatatcacaaccaatgtttccacaattctttttaaaatctgtcgcataaaactctccattcctgcatgtgaaaaatcttattcttcacacggatgtctctccgtagttattcttcgtcatcctcatccatgacatcttcttcatattcgtcatacgctctctgatgtctctttttgctgcggttttgatcctgatgcgccacatcccggatcagacttacgattcctttataaatctcccggatgaccgcaaaaataaaaaacatcacgataaacccgactactccaaatacgatatctgcaaattccatattgccggtattcgtcaccttctgtccgatctcaatcgcaaatgtgatcacgatgatcagtgtaaaaacataaatccatgcgatcaccatcacatgatcgtgttttgcgagccatttaaaaacaggatacaccacaaaaataaacatcattcccaaaattccaatgactaaaaaatgcaattccttatcactgaaattgtattcgtatgcatcattgaaccggagcagataactatgtatcttcgcgagcagttccacaatgccataaagtaattctttcataaacctcatcctttctaccgggaattatcgtaatatatcttttttaatttgtaaagaaagaaacctttaatttcccataaatcaaaaaatacccggggtcttgcgactccgggcatctctcatctactttgtaacctgtgatcaatatacatgtttctttgacttatgcgcttctcttgcctcttctactgcggcatgatctgcaatattgatcttggctgctgcctttttcttttttaatggatgttttggattcttatctgacatactatacgcttcctttctgcatatcatctttcatccttttactttatttccttgcttcggttacgttatagcactataaatcagcaaagtcaagtattatccatctgtttttttgttattttatgatttcttttaaattttcagaatatttttataatttataatctgaacctaatgcagtgtaatatacacgaaatccatgccttttcttctccacatagtccatccggatcagcagattgataaattcctgtatcagacctttttcccagcgtctgttatacacttcattcactgcttccgttaactcagcagtacacatctcttcatttctgtcccacagaatatttaagatcatattggctgtgtccggaagattgtctaaaaatacactttccatctccatcactctgctcctcatctttcgtaatgctccggtacttattcaaaccgtgactttctgcccatgagtttagcatagatttgatggcattaaaatagatatgtccgatattctcggaaacacgtccttttcacatttatattcttaatatggcggattttcccaggtttatgcgtcaattccaagttccgccggaaggaaacgcggacagacattctcggatgacgtgatcacggatgccgccagacgtgttccaatctccaccgcttcctctaaggtttttccgtatgtcagaccacttgccacacctgcgcaaaacgcatcgcctgctcctgtcgtatcttttacctgtactttttttgccgggcagatgccgtatgtgccttcccggtctgcatagaccgcacctttgcctcccatcgtcacaaccatggacggaatattggcacgttttacacagcctgcaagaatttctgcgagtgcttccggtgtcttttcactgtaatcatccgaaaagaacatccctgcctctaactggttacagataaaacagtcaaatttccgcaggaaatctcttctctctgccgcaatactcatattgctgacaaccccgtaaagcggttttttaaacttttcacacagacttaccactttttttacgatctctttatccatatccacttcgatcacgacagaatcagcattttcaaaaatctcatccccggcttcttccaacacatcaagaatcggcatcagattcggtctctgtgaaattgaaccagcaacatctccacgatggtcaaatacggcaagccaggttcccattccatttggaatcgttaacatgtattctgtatttactttatgattctgcagtttgtgaatgacatcacttccaagtgccgaatcatccacaattcccaaaaatgtagggcgcagttcgatattcgcgatatcttctacaacgttacggctgacacctccatggatatattcgattcttcccgcatttctcccatccgggatataaatatcttccggaacccccttgatatccacaaatactgcaccaattactacaattccatttttatttactgccatatatttcaattacctttctatcgttttctgatatggatctccgggatcgccacactgtcataagtaattcccggctttttttcatcttcatctgccgcatcctccggttcatgtgtatggatctccggaaccgcaagattatcataagtcagattgtattcgtgacctttctctcgtttctttctgaatttaaacatacttactccgtttcttctattataatatattgatgaaaaatgtaataaccagactgttgataaaatctgcaaacagacttccgatcagaggaatgatcagatacgcctttacggacggagcatatttttcacacagcacctgcatgtttgccatggcgttcggtgtcgcgcccattccaaatccacaggttccggctgcaagcaccgctgcgtcataatcttttcccatcacataaaataccacaaaccttgcaaatacacagatcaaaactgcctgtactgccagcagtatgataagcggcagtgcaagcgacgcaagctgccacagttttaacgtgatcattgccattccaaggaacaatgacagcgaaataccaccaatatcattgatctctcccatatggatcacaaacttgccggaatactctccgatattacgaaacagcgccgctgcgatcattgcgccgatatagattgggaatgtcattcctgttttcgtcagaagccaggaaaaaacggtgcccagtccgattgccagaatcagctggaacactgcagatgcatacatattcgtatgacgctcatgtttcttttcatcttccaccagaagactgtcatcttccggcacaaccgtatcgagcagatttttcttttcgatcagtttcctgccaagcggtccgccaaccagacttcccgcgatcagtccaaatgttgccgccgcggtacagatcgtcgttgcaccttccacattcagatcctccaggaccgggccaaacgcgcccgcagttccgtgtccgcccaccatcgggatcgaaccggtacacataccgatcagcgcatcaatgccaagcagatgggatgttccgattgcaagcagattctgtaaaacgatcaggagaatgaccaaccctaaaaatattgccagcgactttccaccactctttaacaccttcagatttgcctgaaatcctactgatgtaaaaaagaataccatacacacttcccttaaggtatcatcaaaagagatctccataaatccactgctgtaacagatacatgtgacgattgcaaatagcagtcccccgacgaccggcgccggaatacagaatttttccagtacatgtatctgttgttttagataactacccagcatcagcaccagcaccgaagctgccaatgtctgatacatatccaactgaacttccatatttatcctttcgattctaattcccaaaccggatcttatttttcaaatccggtatttactctgtcggcacctcgataccgcactctgcataatatgccgccgcacccttatgaaacgggattgtaatacctccaatcgcagactgctcgtcctcttttaattcgattgaggccgcatagcggatatcctttccatgtaaaaataaaagttccgttaactcttttaccgtattctccgataaactgtcacctgccagaagcaccgcctgtacagacagtgtttttacctcttctgtctgaccggtataagtgcctgccggaatcgtatattcggaataaaacggatatgccgcctttaaccggttccggcattttacatcaatactcaacagccggattccgcattcctttgccagttccccgatcactgtagtctgtgttcccgctgtacaaaagaacgcatcgatctctccatctgcaagtttcgctgccgcctccgtgtaatccaaattgacagtctttaccatatctccgctgatgccctgtgcctgcagaatctggtttgcgttccgctctgtcccggattcctctgccccgatactgatcgttttcccaagaagatcatccaatgtctcaatctctgaatccgtgcgcacgatgatctgacatgcctccggataaagcgctgcaaccgctttatatccctggtatgctttgtcccggaattccccggttccatgataggcttcctccaccagatctgcctgggcaatccccagttcaatatatttgcccgaaagaagtctgacatttgctgcagatccggcagtattccttgtttcaagtttatacgaaaaatcctctttatttgcaagactgacatatgcattggcaaaggaatcgtacattccgccgattcccgcagctccaaaccggattgttttccggtttgcgccgcatcctgccagcattaagatcattgccaatccaagaaaaatataccgactttttatcaatctatgccccctccttttcgattaacttttatctgcatgttatgcatctgatctcgcatatgcatttttcatctgaccgctcagttcaaacagtaccttatcgagtgtatctgtggtttctttctttaacattccggcaaccgcacggtttgcctcatgccggatctcttttctttttgctgcatccgtctcttgggaaagaagtgcatcataacgattaatcagctcatgacctttcgctaacacatgttccttatatctttcaatatggaataccgaactgcggtaagaggcgtctgccatcgccgcgatcatcctgcctgaccagtaaaaattgtccgtggaaacctcacctgtggtgttgcagagatagtccggtgtctcatcgatatccgcataaaacggaaccagtacattaaacgcattggatgcaaatgcgatccactcgatcacattacagtcacgttccattcccggacgcatctggatcacagccaaaaagtcattgcggttgattccgatcgagcggtatgcaccgcgcatatttttctccccgtatgccgcatacggatcgtacggcgtcccctggaagtgggaggacagcacatattttacatcctccaccgtgatcttcttttccggtaccatacaccacggaatatcgtcggactgcggggtatagtctgcatgttctccatcccagactttcgtgtgcggatttaagcagcgctccatataccacgctctcggcgtattgtatacatggtctgcgtcatcatggctgccaaacgcatctctcggatttaagctgccgtccattgagagattcagatgatttttctcaataaattctttcatatccgaagaacacatatattctttctgatcagatagcgcatcctcaagatcaaagtggtcaataccaagctggtttggcatgacaacatatacatcatccggcacccttcttgcgatccagtgatgtccgccgatcgtctcaagccaccagacctcatcctgatcctgaaaagcgattccgttcatctcataggtgccgtactgttctaacagagaaccaaggcgtttcacaccctctcttgcactgcggatatacggcagaacgatacatacgatatcctcctcgccgatcccgccaggtacttcttcttttccatcttccgccggctgaagtttaactaacggatctgctccaagcacacgcggatttgatgtgatcgtctccgttgctgtcatcgcaacatttgcctcattgacacctgccgctgcccagattccttctccctccacggcatttggcaccgccgtatagcgcatcggatcatccggaagttcgattgtcacatgtgaaataacagatttatatgttttcggctgctcctccggatgaataacaacaaattttttcggtgtaaaatgtccggaaccggaatcatcatttcttgcgatcatcgtagaaccgtcataagatgcttttttcccaacaagtattgtagtacatgccatttttattatctcctctcaagtgttttgtctattctgcctcgtcataaaaaattttgtctttttctaacaccgttccgacaccatccttcacctcaacaatgcagacagaacagtttttcgggattcccccgcgccagatatcttctttatcatcataaaaatttgccagaagacagcgtccggctgccccgtgtgtcgatatgaagatcgtagcattttcatacgccttgttctgtaccagcgactgataaaaatcttcggtccgtttcaaaacatcctgaaaactttccccgcccggagccctcatgcagtgatacggatcattgtaaaacttatcaataaaatccggtggaaggactttgctgtctctcacacattctccctcccagtcgccaaaagaaagttctatgatacgtctgtctgtgatcataggaagatgtcttcccgccatcacaagctctgccgtctgttttgcgcggatcaggggacttgaaatgacaagatcaaaatctatgtctttcatgccttcaccggttaattctgcaagacggatgcccgcatcatttaacatgatatcacgctgtccctgcagttttttctgtttgttccacgatgtttcaccgtgcctgattatgtataatttcatctttttacctttctgtactttatctccgggtaataaacaaattttctgctcattgcctaacacattatagcatgagattttttcttttccaaatcttatctatgatttcagattacacctgtcactgacgtattttttccaaatctggattcttcacagccgataagcatttttttcgtacaaaataatagcagatcacctgcattatgatcgtagccagccaggacgccggatacgagataaacagaaaatacagggatctgtgaagcgggaaaaatacaaagatccataaaatacgcatcccgaccgtgccgattacagacaatatcatgggaacagaggaataccccataccacgcagtgcgcctggaaaaagatccatgatgccgcacaggaaatacggcacggttgtgatggaaagtatttccaatccacatgcaatcacatccggttctttggtatagatcgtcagtatctgtgccccaaagaaatatgcgctgcatccaagcacagcagcaacactcacagacaaaatcagacaatccataagaactcggtccattctcttatattttcccacactaaaattctgactcgtaaaactcatgcaggcctgtgtgatggaattgactgaaacatacaaaaagccaagcaggttattggctgccgtataccccgccatcgccgtcgcaccaaaagagttgacggacgactgtaacagtgcgttcgaaaagttgatcactgtactctgaattcctgccggaatcccaacctgaaaaatctgtttcagataagcaccattgatggacagctttgaaaaatgaagctggtaactgccctgcgtcctgcaaaggcagcgcaaaacaaggatacaggacacacactgggaaatgatcgttgcgattgcaaccccggcaacatccagatggaatccaatcaccaggatcaggtttaatcccgcattgatacagcctgaaatgataaggaagaaaagcggtcttttggtgtccccgacggcacggagtatcgctgcaccgtaattatagagcataaaaaatggcatccccataaaatagatccgcatatataaggttgactgaccgatcacgtcatccggtgtacccatcagttccagtgctcccttcgcaaacagcacaccaacaaatgccatcacaacaccgctgatcagtgctaacgtgatcgcagtatgtacggtctgtgacatttcttcctcccgtcctgcggcataaaatcttgccgcaagcacattcgctccaagtgaaattccgataaacaaattcacaaatacattgatcagtgccgttgtcgaaccgaccgctgcaagcgcctgactgccgctgaatcgtcccacgacgatgatgtcgactgcattaaacattaattgtaaaattcccgaaagcatcagagggaatgcaaaggaaattaatttatccatgatagtgccgttacacatatcgatttcatatttattatttttcaatgagaggactcctttcctgatttcttactatctgtattttattatgcgtatcttgttatgcataaatttgtattgaatattttacattgcgtatcttactgcctttttggggcttcgtcaataaattttgtttggttatcaaaagggggatttagaacgtaatggggcagcctgctggtgaaagcagactgccccatcttcagaaaacatgtaaaaattttattatcgtgaatgatttaagaaccggacgggatgcgcacgatataatgctctccatcccgttccacccgtgttaagaccggaatatgttttttacgaagctgatgcacaaccggataggtcaaaaaaacatcgccttccacataaacagcttccggtttttcctttaaaatctgtttcacctggtctttgatccggctcttccactgttgcttttccatgataacttctccgtaaattccctgcacctcaagttccgggacatccggcagcgcgcagtgtgaaatgcgcgcatgctccattcctggcagctgctgtaagagttcatccgcttcttttccaccgccaaaatttacgatcaccggctcctccttaaagcaggacaaactgatcttacatgccgccacggcatcttctaatgtgccagccgtcatcagaaaacctcccttgtggcagaagcctgcactgaaaagtcctgttgcctgcaccagctcctcattttctaatccaagccatttttccgggaagctgcacttgtaattcatggagtattctcttttctgtggctggatacagtaaccgccgcggttggatgggaaaaccacaaatgcgatatcggtttctgagagccttttctgacacgggataaattccggcagaaccagtattttcgcctcatcttccggtttttctcctgcctcaagtgccttctgctgtgcctctaaaacttcctcgatccgtttatctgcccgctcatttccaagatagcgttcaaatttattttccaaaatcattccggctacaccgactgcccggaaaaatgcgtcatcactgctgcccgctgcatcccaggtcggattgaaatttccgatcagtgttgcgagttcatttttctccccggtattgtcattgttatccagcggctgaacaaatgcctcatcaaacgtctgcgcgagttcctctcctaagattccggctccaagccgctcccagagcagtccaaatgccgcatacggcactccgttttcacggatcctgctgtctttctgatgatggtcatactctccgcgtccgatatcaaatacgatcccgtcatagccttcgggaactttgctgccacgcgtgatcgtgatttccggatttaagtagagcagcaacgctgaggaaaaaacgtcatccgcgtgaaacttaccgctgtgggtaaatgcttttgcgtcttttttggtgatctgttgtaataatgtgtgattcatgatgatatccttttacctttttacatgattacctattttaaattttaaactgactgatgatcgtttcaagttcatccacaatttctttattgtccaaaaccgcatccacaattttcttaaactcttcatcgatctttgtcatatatccggaatttttcactacttcttccttctgtttatcaaacccatccataatgccatttacataataatgaatacgttccatactctgctgcagttcatctatacatcccccaaacttctccatctgatttttaaaattatgtgcatcgcttgcatattcctcgcctgtatgtacaagaacatcataatctgaaataacatttgttttcacatagtttagcaattcaaaagaagattccgccagtttatctacgatatccacgataaacgtattaattttctgaatttcccctgcagtctttgatgattcctctgcaagactggatatctcgtttgccacaactgcaaaccctttgccactttctcccgctcttgcggcctcaatgcttgcattcagcgcaagaaggtttgtctggtctgcaacattcagaatctggtttgtaagctgttgtacccgctctacttccttcgattcttcaattttatcttcaagcgtctttccaattctcacaatcgtattctgcatacattctctggcagatacggcatcttcttctaacttttccgctttttgtccaacctcaccaatgtactctgcctgcgattttgtctcatgtatgacggatgacatcatttccttattgctctgtgcattttcagcaatcttatgcaccatgtcgctcatttcaagaaccctgccttccatagcgttcatggtagcatttactttcgacacttcatttgcagacgaagttacaatattatttacatgctctgaattacttaaaagtttcttttcacttgcactgatattttgaatgatctcacgcaagttctccagaaagatatttaaactgtctgcaatatttccaacctcatctgtcgatcttacatttatcttctgtgtaagatctccctctttctttgcaagctcactcattttctccgctatcacacttacatttcttgacaaaacaccactgataataagcgcaagtgctgctgctatcaccaatcctgcaagttcaatgattacaaattcttttataaatatgttttcctgaagtctgatatcagttgcagaacaatccactcctacaattcctgcaattgcaccggaactattgtaaaccggagcaaatgcactataaaaatctccccactcatcggatgtcatttcactatcaactgtggcattcccgtcaaatgcctctgctatttcatcataaatctcatattcttcgccaatcgcagccccttcttcagtatcagcgtcaacaataaattccagcctgtcaccattcatccgcattgtatatatgtatttgatatcatctccacacaagaaatcctgcagctgcgataatatttctttataattttctgttttctcatctccggctttaatttgtcctaaaatatcaccatcgattctttccgcggcaattttagctgaatttctggcatttttcttacactgttctaacaatgtatctttcgcctgtacgataaaaaaccagccgatcagattcgtcacaatcaaaacacatgctatcattccggtcaaaatttttgcacgtatgctgattttaaaatttttctgtgatttaccctctttcatgctgtcccccgcccttcatatcatttatatgaatattatagcgttttgccttctctctggcaagaaaatcaaacttgctaagttcttcttcccttgtccggcaatgaatcattccatcgtcagcatacctttcaaatggtgcttgcggaaaatttctttttccgcatattccccgatatcctcgaccttgcgccagggagaccggaataacattttgcattgattgacggtgaccctgatcaaccagtttttcaaatggaaatctgattcaatccgatactttcctgataacccgccatcccatattttgttaccgcatccacgacagggagcagcctttcatctgtaatcttttgcagcattttctttctcttttcagaaattatttctttcgatctgcactgctcataatcgaaaggcgtcatatgccaatagcagaatgttccccgatagtactgcgataatttttgtgcgatcagtatcccctccggatcgagatcgccggaataatataccttagttcctgactttgcaagcagttctaacaccaaaagccctgccagtcttggctgcccattcatgcacatgcacgacttttctccacagatcagggcaaaaacagacgggttttccacgataaagatctcatgatccacacactcgatacgctcccattcagaaagtactgtaagcggcacctgcaccatatttttttcctgacagaatccgtccatccctctgtgtaattctccgttctttttgatcgcatgcacgttataaagcaatgcataattggaaatatcatcgattaatatcccggcaagaagatagcttttctgtctcttatatgcaggaaacatttctaaagtttccacctgtatgcccctctgtcctaaatccatttgtatgacctgataaaggatctttccctctgccgtgccctggtcaaatgcatgcggatttccggttacagcagcggcaaataccgcgaggtacacgctcttttgtgtgcggtacggcaaagcgttatataggttcgcacacagccagagaaggcgtttccactcttttaagttctctttgtcgctgctttttaaaatattttcgaatgtatcaaactccaaaaaggcaggagtccctttgaaattttcaaggaactccttttttatctcccgtatctgattttctttaaatgccttttcctctgcctttccaatcagcgcttttccaaaatactctgccagcacttcttccggtgtgaccgtcccatatttgctgcaggaaagtgcttttcggaatttttcagcagaaaccgtaatactttttttgccatgaaaattctggcagaagaatccttctaacgtgtcaagtccgtccccagatatattctttacagtcactttacccgaaaatctgccgtaggaactgtatttctcacgaaaacctgtaaagatgcgctgccagatctcattttgcctgaaatatgccacgcagtcacgttttaacttttcatgccctgtcaaattgttcaatctctatccctctttgttctactttttcttcatcatctaacagttctttactgtgtccgttccataaataaggcattacggtaacaaatttcgcgttttccgggcggatcagctgataaattgccagcgcatccagcgtatcacagtctccccacaatacctgtgaattgataataaaatcaaattcaaactgtgtcatcaggcggaacatgtctctgatattccggttgtcgacaccggcaaatgcctcatctaacgagatcagtctcggcgcatccgccctgccgccctgatattttgcaacgacagcagaaaagagcggtacatacatggacattgctttttctcctccactgaacgtaccaaatacactattggtcagttccttctggcgctctccgcttttttgggagaacaactgaaattcaaaccattttctataatcaagtgtttctttcatgatctgataaaaggagatcattccggcactgtcacgcgcattgcgtctcgcctcgtcgacctttgacctgaaatgtgcagaaagtcttgccgcctcttcttcactcatcagacggtaatctttctttaacagttctaccagttccctggtgtcaagctgatcctctttttcggctgtcttactcctccatctgagactcagtttcagaccgcttgacgtatccatgccattcatcagcgtattcattttctgcacccacagattcgacgcattgatctttccccggatcttgcggctcacagtattggccagaatatcttcgaataattcccggtctccgtctttgatcaggttttcaagctcactgatgtcttcatcaagatgtgtcagcagacttgcaaacgttaccttcgtcccctgatatcttgctgtgatatcaagccgctttggggtataatcatctattttttcactctcatccgattctgcaaataattcattctgcgtaagctgataatcggtcagaaaacctctgttttcaaaatataccctgttgaggtcagcgataatactgtttttttccatatctttgatatctgtcagcagataatcataaatatgccctgcatcatccgtaatctcttctggtacagccacataaaaaagtcccctctcctgttcataacatttccggtaaaattccactttcttttcatatacctttatcgtatccgcattgctgatacggttcgcttcgatcagctttgcttcatccgtcttttgtgttttttcggtcacacgtttctgaaactctttcggaaatgcattcagccacgaaatgcaggcatctaacctgtctttgaccgcttcataatctgtcagggcaagctgttccagaatggatgttctttcttcctgttttgaactgatctgcttttcggtctcccttatgtcatatctgatctgatccatatcaagatctaaatcttctaaatgaactttgcgctcccttaagtatgccgcgcttcttaaaatcatttcatgtgccgactttaactctaccagatttttgtcatattcctccgctgcactttttgcactctggaacgtctcataagtacagttgagatacaatttttcagcgatctcaatcgcaccctttttcttttcctttatttcttccagaaaggctgtcagctgctcccccgtcttttcattttcactccgcagcaattcatacttttgttcttccgctaagagcagcttcattgcctccctcagatccgtatcgcccggaagcgcatcatattctgatttcagccggtccttccgttctgataaattgtttcgttctctctctaaacctgcaatcttttcctctaacaccaatatcagatttttacattcttctatttttgcaagcctgtgtctttccctcgctttactgcccagataccctgcttcatattccccggtaactgttccagccagaacacccatatgataggaaccatcctcagaaactgacacttcattctcaccgccataagcgatacttgaaaggatttttgtcagtctctggtttgaaaaaatatcattgacttcctcgtttagttccagtacgtccaacagactcttttctgcctgcgtttttcctgcaaaaagataatggtcttcgcacccttttaccggtgtaagaacctgttccctgtattgctcatccaccacaattgcatcgagtattcccatttttagcagggcttcttctaaatggttacaggcatcttcatccagctctgatccaaactctatcactttataaaattcctgatatgggatccctgcttcatccagcctctgacggtttcttatcacagcttctgatctctgtggctgtggttctttctgattttcccactcactcagctctgtttttgcttcatcgagttctgtttttgctgtttcctgctccagaagaatggaattgatctgcgtttctattttagactgctttttaatccattgatctgcagccttctggcgtaccaccgcgtagtcagaattttcctcatacgtatctgcgaatgtactgagctccctcaatagttccttttccaatttcagttccacattgttttcattccattgataaagtgcttctttccactcattttctacctggatcagcatgttttcaaattccgatatttttcgctggagtgcgtctaattcccggatctgcttctcccttttctggatcatttcatccttccgcctgtcaagacttttaagttctgcgagcaatttttctccatcattgatatattgacgtgtatgttcaaactgctgcctgtgaagatcaaatttataatcattttccagatcagcacacagttcctcactcataaatgcaaattcctggaatgccatctggtctgcttcctcacgcatatcttctaacagagtctctacttctttttctttttcatactttctgttttcttcctctttgatctggtttgtgacatctctgtactgtgcttcctttgcagccagaaatgactttttatccgcaaggattttatcatgagcctcaagttctttggtgagctgtgcctctctgccctttagcgcaactgcatcacttttattgagggactccttttctttttctaaggtttccttcttctgattcatctgcagaatctctgtttcaagttcctcaatcttccggttacattctgcatatttatcctcatatgccttttgttctgctgccgctttttgtaatctctgctttgtacgttcatatctgtccgctttttcacagagcagaagtttattatatttctggaaaaccgcattgatcttttcagcagcccctctcgcctccttgcgcccctttaaattcatattcatcatgtccatattttcaatggcttctgacatcggacgcagatcctcatccgaaagcggctggagagaatcactcaatatatcattgatcacagacggtttgaaatcctttgacagctttggggttcgaagctggatcagcagatctaccatttccttatattcatctgcagtctcaaatccaaatatctgtctgttgacataatccatgtaatctgcctgacgatcaaatactcttccgccttctgccaccctgttttccagttcttttttggaaagggtcactttctcacccatatctttgtataagaaaaagtctttgccgatgcgtcttccatctgtcagactgaaataccatttatcgagcggtttatttcgctttgcgcggatccccattccgatcgtcagatatgtttcactgtcttttcttttgaactcaagataaagataaccagttctctcttcccttccatcattttcctcgagaagataactgctcattttacgatcccttgaaccaaacggatcaagtctctccggactcatatttccgtctaatagtaacggcacaacactctgcatcgttaccgattttccggaaccgtttgaaccacggagaagcatccgcccctttacaaaaggaaattcctgttcatcataataccagaaattgatcagcccaattttatttgcctgccatctactgttcattttcatttcctcctgtgtaatcctgcggataacttccctgtatttttccgacaagcggacagatttttatctgatgcatatcatccactttttttataaacatccagcgttccatttcatctgttacgttttttataaactccccttccggcatatcccggtaaagtttcgcaaaaccagatccatattcctttttcacatccaggatcagagattcaaactcaatcttatcaacaagactcatttcttccggcgttattttccacaccttaccttctattttttctctgatctttccaaaggcaagcattaaaatatctgccagggaattgttctccggaaaagcagctcccatccggcagtcctgcccggataaaagaaatgcacttccccgatgaatctgtacatgacattcaaaaagctgttctaattcttcagaaagcctgtatccgtaatattttaaatactcgaaatcctcccctgatccatcttccctgtacactgccggtgcaaacaacagtctcttatacactctgtgccttctggctaatccgcggtcctcgtccacttcaaaccattcactttcccggaaatcttccggttttgtatactccatgatatcccgggaaaaatttctcataaaatatttggatgcccctgtattttcatataagacctcgcccccggcatcatccataaacacatcatctgttccatccgtcacacggaccattccctgttccaccgtatagcggagtacccggatgagttttctccggttgttgtacaatgtccagtctgtgatctcaccgggcatcaccgccgtcatatattccgtcagctgtgacagtataaactgctcctgtgcatctttatcttccagaaacatcaataaaatacacagatacacatattcttctttcgaagagaactggccaattcccataaactgctccgggatgaccggtatcttttccagttttatcagcaaagaattatctatgatctgacagcctaatttatctgtcacatatttccggatctccccgactgcatccctgaccctgtaatacagttccttatcttctgatttcagtatccagcgtctgtttaacaaaatttcaagctctttcatacgctctcctcctgaaatacgatcctcatctttggcatggtaaaattgccatcctcacaatgcaccacacatttttctgccatattacttttgtctaaacgatatcttctgccatcatccgtccttgcagaaaaatcaaccgactccattgcatctgaaatccattttaaaagtatttcccggattctcggctctaaaatgggcaatgcagaaaagtcaatggctccatctttttctaacatctttattttcttttcctcttccttttgctgctctaacattttcctgcgtgtttctaattttttttcggttgattctatgatggaacttctttttgtcttttcccggtatgtgcgcactctcggtttcagttctatctgaatcggcttttcttcatacactccccggttcatgctgtccgtctctcttacctgatcccctgcgatatgaaatgttttttccatcccaaaaaccatggcagacattttgtgtgcttcctcaagattttcacatctcataaacatttcagcgacttttctgtattcctctttccggtttgcaccgagtgcatttttttcactcaattgtgctgcataccgcgtgattcttcgtatgatctcatttgtcacgtcaaaaagttttgctgcctcattttcctgtccttcactgcccacaaaccagtcataaatacttttaaaacgtccctctgccttctgccggatcattttttcagacacttccacttccatacgcggaatcaaaagctcatattcgacgatcttatcaaataccgcctcgcgcatatcactttcctgcgttttcagacactcctcaatcacaccgacattgcgctgcagacctttgataaaactgcgcagatactcaatcagtctgtctttaaacaccagaaattcctttgtgcgcatcatttcctctgcctttacgctgtttaagtccctgatataatcctgataattctgattcagcctcataaaatcattgtttaaatccgtccaccatgtataaacttcattcttatctttccctgccatctctggaaaacgttccatatttctccgtatccgctcaagcagcgtaggttctaacgatgccccttcaataaaaagattttcaagacggatcacaagtctctcgatctcgacactgtattccgacatctgataacggtacttcttatttttaaattcttctatggaggacactcttcttgtgtcctgtatcgtgtttaaatttttccattccgtaagcatcgtcagatcctgctggcactgctcgattttatactctgaccagaacggatcttttaacatttcctcataaacttcttctaaatacagccagtattttaacttttcataattctcaaaaaaaatgcgcataatgcaacgatacctgctgacattatccgcatttaaatattttgcctctgtgagtggttttaataatttatctgatacctgcaacgcgacatgttctcctttattcatgatacgccagaaccaactgcctgattctgatatttgtggtatgtctgaatcagcttcaaccgcctgattccagttactctccaacttttattccaatgtttatattatacttacaagttgagacagccgcaagaaaatttttgtttcattttaagatttacagattttctgttactgttcgcacttcaatgtgaccaacaacaattacatcccatgaaaagtacctctttgaggcaggggggctgtaatctcacaacaatatacactacagcacatagcttgacagccaatcgtcaagcttgcgtctgaacagtagcgattttctctcaaattcactgttttacataacttaccagccattaagttgtaaagaatcttttgatatcacaatcctataaaaaaaagacactaaattaatagtgtcttccatacctcagtataaatagcgagaaagagacttgaactcttaacctcccgggtatgaaccggacgctctagccagttgagccatctcgccatatatttatttgaacaaaaaaatattgataccttcaaaacttcatacagatttccgatttttttcgaaagtggtcattgccactttccatgcgaacattgttcgcattgttttggtcaagccctcgatcgattagtaacagtcagctccacacgttaccgtgcttccacctctgccctatctaccttgtactcttcaagggatct

SEQ ID NO: 5225 - DNA, 2717 bp, Unknown
  gut microbiota DNA sequence
tgcagcaacactctgaaccagttttgttccctctgctgtttctgcaataatatccgaaatattctttactgctgccagagtatcttcacgctctttatctgcctgctctgtactggatacgatttcttttaacgcatcaaacagtttctgcatgcattggttcatatcatcaaacactccaactacttcctgcactgcctctgtctgaagtgcaaccatatcccgtgcctgttttgcattttctacgctgtttacagtctgatctgtgatatgagttacattgttctgaatttctccggctgcctctgcagaatgatctgcaagtttcctgatttcctctgcaaccactgcaaatcctcttcctgcttctcctgctcttgcagcttcgatggaagcatttaaggaaagcagatttgtctgttctgaaatatctgtaattgtctctacaaactcgttgataatctcagattcttttttgagttcctcaatactggtctcaactttgattgttacatctgttgtctttgttgctcgttcgcccagagtctgaaccatctgcataccatgattgatcatattttcagcttcagaaaccaatccttcaacctgacctgcaatactgctgacattctggatctcttcggaaagcgtatctgtttttcttacacattcctctgcatgttcggactgttttgtaatgccatcattgatctcatcaattgcctgaatgatattcacggaataatctttcataacattcgatgcctgacgtacttcctgtgccgatgactctaatgtatcggttgctccgcttaccttttggacaagctttttattattattaatcatatgatttgcaaccactgcaaggttattaaattcatcatgaccttttacgctgacttttgttgtaagatttccctctgcaacctcttcaagtctgccggaaatgcgtttcatatttttctggattccggtactgatgataataccaatcagcactgcaacaacgcacgcaatcagtacgactgcaatcgtcacattgcggatatcatctgcctgtccattaacgatctccattggtacaagtgcacatacagcagcatttgtacgctccatcctgctgtaaaagaacagataactttttccgtttatgctaacttctttcgtggtctgctgatcttcaagattattaaagaaatcctgtccataaaatacagtttctccatctgctcttgtactttcctgaccatccggaagtttttctgaaataatctctcttcccgactgtgtcacaaacccaataatactgccatctcccatatcgaggctgtctaagaactgctggattgcagatgccttgacatcaataacaataaatcctttaccagactgtggcgtcgtctgatatgccataatataatctgactgttttaaaccaagtgtatcatctaatgtattatggtaatcaacccattccggtattttttttccattatcagaatatcccagcatttcattcttataatctttgtagatacccatcactgttccgcctgcctttgtggataacatctggacatcttcttctgtcacaatatgtatattactgataaagtcatttcctgcctgagacgcacgaatacttgatccaacgctgttaataaccgtttttctctgaaccgcatctgtttcatacaaccctatcatgtattttcccagatccgattggaatgcatactttaatgcttcagcttcaataaacgagttacttacgtctagatattggtttgccatattaatggtctgttcattggaatcccggaatgtatcatacatacctgcggctgcttttttataagaaaataccccaaccaaaattaaaaacagaatcggtaccagaaaacataaaaaaatcttcgcacgtatactgaacaatacaccttttttattctccatgctttgcacttttgtgcgttttaaagctttttttgtcctttgcttttttacacttttcacagctgttttcatcttcttattggccataatactaaccctttcgagcagaatgttctgcctcttccccatgtaatatttttaaaatatatactagaatatcacaaaaaatagattttaaaaagtcaatttttgtaaatttatactttttattgccttttttgtttctttctaattacgaatacaacaaaagactttaggaaaaacctaaagccttctattttcagaggcgacaatcggaatcgaaccgatgataagggtgttgcagacccgtgccttaccgcttggctatgtcgccatataatatttttaatgactccgacgggaatcgaacccgtgttaccgccgtgaaagggcgatgtcttaaccgcttgaccacggagccggagtatcatccgtataaacaaaaactatgatttaccggataaaaaaactccccgagtaggactcgaacctacgacagcgcggttaacagccgcgtgctctaccaactgagctatcgaggaatatgaaatatataacaaaacgacgtatttgatacgtcatttatatcatatgcattgtatgtggataccttcaaaacttcatacagatttccgatttcttttggtcaagccctcgatcgattagtaacagtcagctccacacgttaccgtgcttccacctctgccctatctaccttgtactcttcaagggatctt

SEQ ID NO: 5226 - DNA, 2163 bp, Unknown
  gut microbiota DNA sequence
aatatttctggcaggatgtggagcatatggcggaaccgccggcgcagagggtgatgccgtgatgcaggagttgtatgatcggagcgagattgcaagaggatacacagatccaatttttcaggagtatttagatcaatatgattcggactgcgagatcaaagagacatcgtttggttttgagcctgccgaaacaccggcacaagcgttgtattttgtggaataccagtacagcaatggcgtcagtgacgatttgaaatatttttatcaggttcaggtggatgataatcacaactgtaccgtttcaaaagaaggggaaggtcaggcaaagacagaaacgtcgacagaggaggtgacggagatagaatggctgacgcagtaaaagagaagtgtgcagccatcctaatccgatatttcatcataagaataaataaattctgttatttcgcagccttatgactggaatctgcggccatattttccgcataatcgagagcttccacaatattcggaaggaaatgttcttccccgatcagctcgataaagtgatcttttttcataacggacatcggctgttcgttgacatgtgagaagatcaaagtgatatgttttttcttcgcacgggcagcaaggtcacgcaaggaacgcattgcactcgcatcaattgctggaacacttcgcatacggataacgatgactttggttgacttgtcactggtaattgcaagaatttcgtcagcagcggcgaaaaacagcggtccactgatctcaaatacacggatcgagtgtggaatatcacgcattttttcagcttcgccaggggtgacatccggctcatctgcatatttccaggcagtgacgtcggcagtttctgccatacgtttcataaataaaagtgcggcaagtacgacaccgacttcgatggcaacgacaaggtcaaaaaatacagtcaggaaaaatgttgcaacaagtacgatcacatcactctttggagcagttttgcacagatggaaaaaggaagtccagtctgccatgttccatgcaacgactaaaagcactgcggctaatgttgtcataggaattagggaagcaagcggcattaaaacaactaaaataatgcttaaagtgatacagtgtgtgatacctgcgatcggggtacgtccgccgtttcttacgtttgcagcagtacgggcaatcgctccggtagcagggattccgccaaacaggccggaaaaaatatttccaagtccctgaccgatcagttcagcatttgacttgtgggtgtcaccgatcataccatcagatacgactgcggaaagcagggattcaataccggctaaaatcgcgatcgtaaatgccggggagatcagttcctgtaccagtttatagctgaatgccggcatgtggaaagacggaaattcggaggaaagttctccgtaaacacttccgatcgtgttgaccggcagtttagcaaaataaacgatggcagttgtcacgataattgcgatcagggatcccggcagtttgtcagttactttcggtcacagaattaaaatcacaagtgcaacggcaccgattgcgacggtaaccggattggtggttgtgatatttgcagcataggcgccaagtttttcaataaattcagaaggaacagcacccatatcaagtccaagaaaatctttgatctgtccgacaaacagggtgactgcgataccacaggtaaaacctgtcgtgatcgtataaggaatatatttgatcagggaaccaaaatggcagagacccataatacataaaatgatacctgccatgattgttgcgacaatcagtccgtctgtaccgtaagtggtcacgatgccatagatgataacaacaaatgcggcggtcggcccaccaatctggacacggcttcctccgaaaaaggaaataaaaaatccggcaacgatcgcagtgtagagtccctgtgccggaccgacaccggaagcgatcgcaagtgcgatagaaagtggaagagcaatgatcgccacaatgataccagaaaggatatctttgatgagctgctcttttgtgtagcccttcattacgtcaaatagttttggtcttagttcgttcataggtcttttgtactccaattctttcctaagtataaaaagtattaaaaatttataa

SEQ ID NO: 5227 - DNA, 303 bp, Unknown
  gut microbiota DNA sequence
gagtccatgccccatgtaggtattgtcaggcattagtgaaataaatcccagcagaacctctccgccttctttgcaggaaatagtaagctgtgcctcatgacaatcctcagctgctgtcagcttcatgtcatatcttgtatactcctgaccggaaaccaccagactgtttccagccagtacttttccctggtattcgatcgctacgttcagtcctatttcttcctttgcttttgcaaataaatacaaagagtaactttctccagcctttacggatataccgcagtaaccggtattagtcagaga

SEQ ID NO: 5228 - DNA, 1612 bp, Unknown
  gut microbiota DNA sequence
ctatgttattgcatgtgctgtagtaacttgtaataaaattagcggaggtaggaattatgctgagaacagcacggacagaaaatggatgggtgaaaggtattgaagccgcagaccctaggataactgcatttaagggaatcccttttgcggctcctccggtaggagagaacagatggagagcaccccagccctgtgaagactgggatggagttcgtgaatgctatcgctttgctccgatttccatgcagagcgtcccgggaatcggtgataacgtgtatatccgtgagtggcatgtggatccggaaattgccatggatgaggactgtctgtatttgaacgtatggacaggtgctaaagaagtaacagaaaaacagccggttttggtatggtttttcggaggaggactccagtgtggatatcctgccgaaatggaatttgacggagagagaattgcacgtcgcggtgtggttgttgtaacggtaaactaccgggttaatgtttttggatttttggcacatcctcagctgacagaggagcagcctgacgcaccgactaattttggaagtctggatcagcaggcagcacttcgatgggtacagagaaatattgctttctttggtggagatccgggtaatgtgaccattgcaggacagtcagccggaggcggaagtgttatgagccagatggcatgtatggataatgaaggcttatttcatcgtgcagtagtgatgagtgcaatgattcgctctccttatcaggttggaggaatcggagtgccggaggaattgtggcatgctgaggaaaatggacagcattttctttctttcatgggctgctcaactattgagcaggctcgtaagctggatgcggctacgattcgtgacaagtatgaggaatataccaaaatatttccggctatgtttaccgtattggatcacaagttctgtgtaggtgacccaatggttcttttcatggaaggcaagcatgtaaatgttcccgttatgtctggaaatacttcagatgaatttcccagttatatagaagcttcctcaaaagaagatttgaaaaagaaagcagaagagattttcggaaagaatgctgagacctttttgcgctttcccgaggcaatgcgggaggattctgatggaaagtatgcgaaggtaaacggaattgaatgtacgatcaagtgtcttttttcagataaaaaaagtgcaggtgaaaaaaagccctactattattacaggtttgatgcagatattccaggatgggataatgccggaaccttccattctgtagatttatggtttttctttgaaacactggcgaaatgctggagaccctttgtggggcggcattacgatctttccagaatgatgtgcaattactgggtgaatttcataaaaacaggtgatccaaacggcaatgatgcggacggaaagccaatgccatactggtatccatatgaaaaagaaaagccctgtgagatgatcttcatgtcagatagaccggtagtgaactgcggaggggtgacaccctttaaggaatttttacaagaacagatcaagaaaaccctttcgacaggtagtgatcaaaactcttggaatgtaaaaaa

SEQ ID NO: 5229 - DNA, 866 bp, Unknown
  gut microbiota DNA sequence
agagccaaataattacgcagaggatattcatgattaggtacgatgatattggtaataaatattgaaataagttcagaggtttattaaatgaagcaattaaagagactattgatgctacagatagtgacagtaggaatgacagttatggtagtagggtgtgggaatgttacaccatacaatgcaacaataatggaaggatcaagtgagttagcagctgaagtcgcagatttaagtactggaaatcggtatagttacgaggaagaacaaggggaacttggtattggagatgctgacacagaatttgtgaattctacagagtctgttggaagagtagatatagacgattcattcaacagttattaccatgtagaaggtggtaccgcagtagccaatacaggatcacaagaggtagaggacgttgctaaatctgaagatctttcaaaaagcagtaaagactcagatgatgctacagagtcaataacagagtccaaacggaccagtgaacaaaaaggtgaggaagaaacggaaaagaaagcagttataaaatttgtagacgagaatgatagtcagagtagtcagagcagagcgactgtaactatgatacaagcaactgttgattccgtaaataaaacaatcccgttagttaacagtagtcaaaatgaaataagatatcaattcgaagaaaatggagagataatttacgatacgggtttgatcaagcctggagaaacggtgtactgggatgcatacagtttactaacggatggatctcatgaattgacatatcattttgagcagattgatgacggggtgacaatagtagaatatcaggcagttgctaatatacaaaggagtgaatagagatg

SEQ ID NO: 5230 - DNA, 501 bp, Unknown
  gut microbiota DNA sequence
ccgcaaaacgcaaagaccggaagtgcaaatgagtttgccgggaaaaagatcatggcgagcatgactgcaaaaccggagccggaattgacaccgatcgtgcttggacttgccagcgaattgttcatcacaccctgtaagatcacacccgaacatgacagaccgattccggcaaaaagtccgccgagcacgcgcggaatgcgcacggtagtgattaaaatataagaagtagaactgtggtctgccccggtcagacaatgtaagatatctttgaatgcaatattcacgcttccaaataaaatgcctgcgcagacagacacgaggagtaacatacacatcagaaggatggtaatgcttttgtgctttttcataggggattccttcctgcaaaagtcttttgtattggttaaaaaaagatggcaaatttgctcattatggtatcacaggcaggggaaatgcgcaatgggttggttttcatttaaatgttaaggtcactaataaatt

SEQ ID NO: 5231 - DNA, 1835 bp, Unknown
  gut microbiota DNA sequence
atcttccaacggttcaaccccattataaaaaataacaaactggggaaacggcagcgaaagcagctttttcccgtaaatgttcaggttattttgtttgatatagctttcatactgtttgccgaaatagatcagtccgcggatcggcatgtttgggtttaaggtactctggtgctcatacagattcagcgtgcctcggacgataaatgacacgtcatttttatatccgagatagatcacatcatcgattgtataaaagatcagttcatctgcatcgctataatctgtctgattcagggcattgtacaattccagcaaaaccggtttctcattaaaaattctgcggaataaggcatcccggtacttcttctgcacaaaaacatgttttgtgtgactgcgttttcttttgtttttccccatgtagttttctcctttgattataaaaaatttaaacgtttttcacaatagttttctgaaatagctggcgaaatgccggaatgaaaaagagtgatattcagaaaatgatcttatggaaataaaatcgaattgcgatagatgtagtatggcatgaagatgctattatagacaagcagaatatatagagaaaaaatccctgtaagtatgcgataatggatatatgcttacagagatttttatagtgaaatccatttttcttttaatgcatggtaaagatcttcatctgaccagtcagggtgagcctgacatagagaatacactttgctgataaatgtaacgtccttgtcaagcaacttagcacagctttgtgcaggaatattttcctggaacatgttgtggatgatgtgtaattgctcaagacgtttgccctccgctaaacccatcgctaaaccatcctcatgcccatcctcatagctgtccctgcgttccatcttaatatattcatccatatcaaattcttccaataacataccaacgacctccgatctgtgtttgataagaaaatcctgcaaaataccgtccctgatacattcctgtacagcggtatctgctgcctgttctaatggaataccgattctgacactcgaagaaattctgttgatcaggatagaatattcctctaaagtccggcatcgcgccatcagttcctgattgtgtccataattaatgttgtaaacccgtgcagtgcactctaagcaggggagggtgctgatggggctggatgcagcatctgttgtcaggtggtttgatccggcacatacaaatgcatccgaaagatgcagttccatgtaatctttatcattttccaacggttcaaatccattataaaatataacaaactgcggaaacggcagcgaaagcagttttttcccgtaaatgttcaggttattttgtttgatatagctttcatactgtttgccgaaatagatcagtccgcggatcggcatgtttgggtttaaggtactctggtgctcatacagattcagcgtgccacggacgatgaatgatacatcatttttatatccgagatagattacatcatcgatcgtgtaaaagatcagttcatctgcatcatcgtaatctgtctgattcagggcattgtataactccagcaaaaccgatttctcgttaaaaatcctgcggaacaaggcatcccggtacttcttctgcacaaaaacatgttttgtgtgactgcgttttcttttgtttttccccatgtagttttctcctttgattataaaaaatttaaacgtttttcacaatagttttctgaaatagctggcgaaatgccggaatgaaaaagagtgatattcagaaaatgatcttatggaaataaaatcgaattgcgatagatgtagtat

SEQ ID NO: 5232 - DNA, 1164 bp, Unknown
  gut microbiota DNA sequence
caatctatgaaatatattttcgatgcactgattgaaatgcttctgatttttgtaacaaataattgattcaacgataagaagagataagttacgatgagaacaatatttgcagaatacaatccacaacgcaacagcattgatgtatataccagtgctggctatatgctccgtattgactgttgggaagctgagaaggatttaaaaaccacacccagatcagtctgttcattaaacgcacttgccattgatgaaccacttgaatatgcaaaattatatcttgatggaacgatgcaaatatgggtggatgcagaggacactctttatttataatgttaaataatcccgaaaaattctaaaatttttcggggattatttttggcttatatttatgattcaatttaactgataatgattctcatatgagatttatctttagaaatcatgtcatcaatcacgccagtctgcatctgattcccatttacattccgtaatctgcatatttgaaaatgttgccttatatgagccttctgtcgggctgcatgcatatattccataagtaattttttctgcaccttcccacatatggaaaatacgcatttgtctgaaatttatgccatcctcactgcattcaatacagtagtcactgtcccttcgtgaaaaacgataccacatacttttaatatcagaggatatgtctgttgttgcccagtcagaatatccatgattggttacaacgcttcccaatcgctgtatttttttattctcatattctatagatgccttaaaccaattatcactatttaaatacatagccacaccacactggtcaaaacgacaggtactctcgaattctgttttaacaataaaagaaaagtacttgtccgttgtttcaacttgaaatactggagcattatcattttgaaaaccataataagtgcgtgcccataagtcggtacccctttctgtaagaattacaactttatcctcactaatttgtacctgctttggttgacgtatccatttaggattgtttttcaaaaattccatcttttttctcactttcttttttattttaataagcagctatatttagtgcctacttttcactgtattataattagtaattttcttttgtcttctgcaaagaatgactcctataagtag

SEQ ID NO: 5233 - DNA, 1173 bp, Unknown
  gut microbiota DNA sequence
cgcttccctctacagtaagctccagtgctgttgtcacttcaccaaagttcgctgcccaagaatcaaagtgataaatccccatctcttcaagtgccgctttctgcaagtaaagctgcatgacatacatctcacacatggtattggatatcggtgtacctgttgcaaacacaatgcctctgccatcatttatctctgatagatactggcatttaagctgcatatccgttgactttttcgctccactgctgctgatacctgacacattattcatcttggaaaaaatcgcaaggttcttgaaattatgtgcttcgtccaccatgatagaatccacgccaagttcctcaaaggttataaggtcatcctttctgctctcatcagatagagatttcagctgttcctccagctttttcttctggctttccatctgctttacagtccatcgctctccgttacgctccttcatctcatcaatcgcatagcttatctcatcaatctgctcattgagcattctttcctttctctctgcggagattgggattttctcaaactgcgagtgcgacatgataatgcagtcatagtcacctgtcgcaatccttgatacgaactgctttctgcgactcttttcaaaatcacgctctgtggcaactaagatatttgctgacggatacagccttaaaaactctgatgcagtctgaccgataagcggctttggaacaaccatgattgtcttattggcaagtcctagtctcttctgctccatgcaggcagccatcatctcaaatgactttccggcaccgacacagtgtgcaagcagtgtatttcctccgagaaggattcttgccaccgcattcttctgatgaggctttagctcaatcgccggattcattcccggaaactgtaagtggcttccgtcatactcacgcagacggatattattgaatgtctcgttgtaatattccacatacttctgtcttcgctccggctctgcaaacagccattccttgaacttctccttgatcatgttctgcttttcccttgcaagcattgtctcattcttattgacttcgtaatgatatttgccatcaccgtcatcaatcctgtccctgactgttacagtctttaggttcagcgtatcctcaaaaatagaataagcatccatgcggcttgtaccat

SEQ ID NO: 5234 - DNA, 519 bp, Unknown
  gut microbiota DNA sequence
ttttccagtgaatggagatggagagattcgaactcttgaccccctgcttgcaaggcaggtgctctcccaactgagctacacccccatttggtaatggcaatcttatttaattgtttaccaatgggcttaagtggactcgaaccaccgacctcacgcttatcaggcgtgcgctctaaccggctgagctataagcccaatcaaaataatttgattttttaatctggcagccacctgctttcccataccgtctccagtatagtatcatcggccgtttgggtcttaaccatcgtgttcgggatgtgtacgggtgtttcccccaagcgcatcgccaccagaatagtcttcacttcgtgaatccattggaagttgcttcgcaacttctgttgtatccaaggttattggcacaaccgttatcaagtttccttaataactcaacagtgaaataatctctacttgatttccttagaaaggaggtgatccagccgcaccttccgatacggctaccttgttacgacttca

SEQ ID NO: 5235 - DNA, 1035 bp, Unknown
  gut microbiota DNA sequence
caaagattatcctatcacatagattatttattttataactaacttcgttattcattcagtaaggtagtctgtgaagatagccttactttactttgattattaactacttaaactatatatactatgtttacaacctatgtattactaacattcttagcagttttaatgtatttccttattaggactgtagtaaatgagattaaacaacatatcacagaagaaacagatagggttattaaggctattaaagataagaactatgtgggtagatgaagaagcagttatatcagaatcagatgaagcattaaatatactaagtgaatgaaacgtatgtcagaacaaactattaacgcaattattaactacttagtccagcaaccttataaagatgtagctgggctgttacagatggtacagcaggatttacaaactaaagaagaacctgctaaggaagaataacccattagcctgtaaatggtatatggttaatgtgaatggctaatgatttatgataatggaatacaggctagtacaaattactagcttaaatggataaatttgatgaattagaactaaatggaaggaaactactagaatcatttttaatacaagtgggtgctactaatctgcatcctacagaagataagtttgcaccagtggactactattttacttataatgataagaaggtagtagccgaaataaaggtaagagatattaagtatgaaggctatgatactcacttaatggaagtatctaaatataagtccttagtgaaggataagaaagatagccagtcagatacagcatactacattaacttctttacagatggaactaaagttaatgcctattggtatagtactaatactgttaggaactttggtactatagattataaatactgtccgactactacagcagccgataatggtaactactataagaaggttattatgattccttctaataaggctcaaagatttaccttagtaaatggtgaatggtctaaatcaataaataatgattatcttt

SEQ ID NO: 5236 - DNA, 205 bp, Unknown
  gut microbiota DNA sequence
gctgtcgaccaacggcatggcagagtagccaagtccggaagggataaacgctgaaggcatctaagcgtgaagcccccctcaagatgagatatccctcacataagtgagtaagatcccttgaagagtacaaggtagatagggcagaggtggaagcacggtaacgtgtggagctgactgttactaatcgatcgagggcttgaccaaa

SEQ ID NO: 5237 - DNA, 357 bp, Unknown
  gut microbiota DNA sequence
cttaagtccgtatgctgcgctcagcatacattcaagaggacgtgattatccggaagaacagtgtgatataagacctgtattccagcgcgacagagaccggattttacactgtaaggcattccgccggttgaagaataaaacacaggtgtttctgacacccaaaggagatcattacagaacgaggctttcacataccttagaggtatcacagaatgcccgcacgatcgcgaaagcactgcggctcaatgaagatcttgtcgaggcgatcgccttagggcacgatctgggacatacgccgtttgggcatgctggtgagtttgtgctgaatggactgtgcgatgaaggtttccatcacaa

SEQ ID NO: 5238 - DNA, 452 bp, Unknown
  gut microbiota DNA sequence
cgcatactttagaaggaaagatcgtccggctgtcggataagatcgcctatatcaatcacgatattgacgatgccataagggcgcagatactgacagaggagaatataccgttagaacttcggaaaacactgggattttcgacgaggcagcgtttaaacacactgatacataacatcatcagcaacagtgttggaaaagacgatatcattatgtcggaggaagtagagcaggctatgatcgaactgcgcaaatttatgttcggccatgtctataaaaatccggtagcaaaaggggaagagaccaaggcaaaagccatgatcgagcagttgttcttctattatatggaacatgtagaccttctccctgagaaatatctgcgcatgcgtgatgccggtgaaacagaccagcgtatcatctgcgattacatctccggcatgacagaccagtacgcc

SEQ ID NO: 5239 - DNA, 365 bp, Unknown
  gut microbiota DNA sequence
ttcccggttactgcattgtacaaagataaaaggttctctttctctgaaaacaacatgcggaatacggtgtctttgtactgacggttggctgctggtatcttttctgatacctgtatacccttcttcatattcagttcctcctatgtgcaggaggctcatccagatctcctgcttttcatttttgtgaataaaaagcatagatttctgaaatgttttttgaaatgtagacggatgtgtcatccttatggtcatgtaaagcaaatgcaactgtctgaataacgctgttcacatggtagaaatatgctttgatttatcttagcatacgtcattcttcgtatgcaactgatttgaaatttcttgtgcag

SEQ ID NO: 5240 - DNA, 2408 bp, Unknown
  gut microbiota DNA sequence
gcataaatggactttggaagcaggtcagaacgtttggtaggattagccaccttgtatgtagatagcttatattctacaaaatcttttacttctttttccagttcagacagtttggttaatggtatctgggcaacgtcttttccagtctcatttgaatagacgtggatcacgccatcttcagcaaattcttttacatcaacagatccggttgcagtatcgaaggaatcctgtaaatgggcttcttgaagaagttcatattcaaccgtatagccgatatcatacagataggagaggacaccgtaataaggctgttcatatttgttaatgtagtatttgcgtatttcaaaggaattgaaatagtcatcaatgattgcattcacaaaatcattggtgcattcgcaatattgcattaaatctccattctcattaggaataaatgcttccatagggatcttgtaaccgctggctagtactttgagaaagctctctgttacaggtttcttaccgttctctacgttgcagtaatgcgttctggaaattccaaagtcttttgctagttggttctgtgataaccccctttcttttcggatttgaatgatccgttcccggattccatcttgatttgtcaacattttcatgtactcctttcatttacacatcatatttgctcgtaccatataagaaacagaattgcttatatgtactatatagtacataattagtatagacaacaacagcaacaatgtcaacaaaaatatggaggagaaacaggtgaaaaaagatgaagtaaaactgctgatgaagcaaaatcaggtaaagcagtgggaagtggcggaagcaatggggatttccgaatttacgctttgcagatggctcaggaaggacttgaaggggaaacagcttgaacggctgaattcggcgattaagaaggtcagaagcggcaaagaggagacacatagagaggaggaacgctaatggaacgagttacgacaaaagaggctgcaaagctgcttaacatggatgttgtgaccttacagtttttgatgagacaggagcggctgccgattggatatgccatcaagaaagatggaaagagccgctatcattacatcatttacagaagtatgctggaggcgtttattcagagcggagggaaatgctaaatggcaggaaaacgatattactggttgaaattgcaggtgggtttctttcaggaactgatcatcaaacagctgcgaactttgccggagggagacagtatcgtcctgctttatctgaaactgttgttaaaggcaattaatacagaagggattatttactatcaacatattttgccgactttagatgaggaaatagcattggatacgggagaaaagtcggcacttgtgaaactgacgatttctgctttgtgccaatatcatgcggctgtgttcttggacgatcaatcgttacagttattgtacttggaggacatggttggcagtgagagcgcttcagcatcgagagtcagaaatcatagggcgaatcaaaagctcctaaaggaaaaagagcaggcaacgttacaatgtaatgcaactgtaacggaaagtaacaccacagaaatttctggtaacccagagatagagaacagtgaaaaggaagagaagaagccaaagaaagagggagaaccagagatagaggaaattccttcttattttgatgatcctgtggtgaatagtatgttcttttcttatctggaatatcgaaaagaaaaaggcaaggaagtgaaggggaaagcaatcggttattgcattgataagctggaaagtttatcgaattctccagtagaacaagtggcaattattaagcagacaattcagaatggctggacggatttctttccattgaaagggaaaaaggaaaaggtaagcggaagcaatgtaagcccatggttggagcgtgaaaagataaaaagtacgggaggtgttttcggtgactaaacaggaatttgcaacattggttgtagccatgcaggcaatgtatggaaaagattttattgggacggaacaagcgttggatgtgtggtacgccttgttacatgatctggactatcagattttatccaaggtactccaacaatatatgctgacaaataaattcaagcctaccgttgcggaactgcgggagatttatgcagagttggttagcccggtgatttctgattggagtgaaggctgggagaaagtcagtaaagcaatcgggcattacggaatgtatcaggagaaagcggtaatggaaagttttgatgaaattaccagagaagtcgtaaagcgcctaggctttcagaatatctgcctgtcagaaaatatcgttgcggatcgagctagatttgcagaaatctatcaagcaatcaaaaagcggaaaagaac

SEQ ID NO: 5241 - DNA, 537 bp, Unknown
  gut microbiota DNA sequence
gacaaaagggaatagagcaggaaaaggataaaacctaacttagcaagcactgcctgtgttccctcacaggcgataaaatgagtgatttctcctacagaagaaatgctcaaatttatcatttagggagaattccctaacccttaaaattatttgaaaggatggagcgatatggcaaaggttagagccaatagaacgaggaaaaaagaactgaaaatttatttgagtgataatgagaaatatatcctggacagaaaggtggaactgtctaagaggaagagtgcttcggattatatcaggacattgatactttttggatttgtttatgatgtggattattcttacctaagacagtataacgaaacgcttggaaaaatcagcggaaatctgaatcagattgcgaagagaattaacagtaccgggaatgtttatgaagaggatatggcagaagtgaaagcgattatggacgaggtgtggaggacgcagaaggcgatgttgaagaagcagccgttgatacataataaataacttgaaaataac

SEQ ID NO: 5242 - DNA, 432 bp, Unknown
  gut microbiota DNA sequence
cttatccttataggaaagcttctttgtacggaaattcacagtatctcccatatactccggtttttcaagcattcttacgacacttactcctgcccattcatatggctttgacatatcacaccggttcttatcttccggatctttgatatatccgtatggcggattgttggtaattggtttcccgtccctgccctttgcctgcaataccgcctttatcttgcggctgcagtcacgcagataccattcattcatgatatttaaaaaaggggcgaattcgctgctggtgtttatatcactgtcaacaccattagagatagcaacgaaatggacacctttttcccgaaagaatacctccgtgtaaaatcctacctgtaggtaatccctcccgactcggctcatatcctttacaatgactgtgccaatgcttccgtc

SEQ ID NO: 5243 - DNA, 943 bp, Unknown
  gut microbiota DNA sequence
ttgctgtctcccgcaagctcatcgtcccttgagagtcgctcataaagagcagttattctgtttttcgatttgtcagttgtctgtctggttctgttcatgccgaactcccttccggcaactgactcatttgtggtagctctatcttatcataatccgctttctctgtcagcgcctctcttgaaataatgtgggaaatcttgtccgaaaaggtatctgtactgttttcactcgttaataccctgattttgtaaactgtcccaccaatcctgcgataaaaaaatccagcttcacatgagccggactttctatcgccattatttagtttttctgcctccataatcaatccttgcctttctctctgataaaaattataattgtttcatgcttccgcttcgtgtaaccgaagctgtattttatccatacttcatagcctttttgctcctttctgtaattactttagtgataaaaaggattactctcttcactaataggagaaatacggctacaaaatcggaagtgttttgaaattatttttgaaaaaatttttaaggactgattaaattgccaaaatatgaggaactaaaagctttccgcaaacaaaacttaataccggcatacaacgattcttccagtgagaaaactatgctgcacagggaagctcgtgcattggcaatcagccgtcttgaagaaagtgcacgaaccgaggaagaatttgcaaattgggcatttacctttaccacaagtttcttatattatatggactacgacagtcttgatgaacagacaaaaaacctgtatcgtcagggtatgtctgcatttggcggaatatccccgacttaccatatctcattagcggaaaatgccccggttatcgtatggaacttccattccctgctcgtcatgatccagatgtgcttttcttttatgcttacggattctgact

SEQ ID NO: 5244 - DNA, 303 bp, Unknown
  gut microbiota DNA sequence
gagtccatgccccatgtaggtattgtcaggcattagtgaaataaatcccagcagaacctctccgccttctttgcaggaaatagtaagctgtgcctcgtgacaatcctcagctgctgtcagcttcatgtcatatcttgtatactcctgaccggaaaccaccagactgtttccagtcagtacttttccctggtattcgatcgctacgtccagtcctatttcttcctttgcttttgcaaataaatacaaagagtaactttctccagcctttacggatataccgcagtaaccggtattagtcagaga

SEQ ID NO: 5245 - DNA, 1153 bp, Unknown
  gut microbiota DNA sequence
cttaggatggcacctttgcgtatcatcagcttacgcttattgcaggtgtctcccatatcatgatgaccactaatttaattgtcttgtcctgttgcggtcaaatatctgccgcaacatctgatgtctgactgtatgtatcagatataatacttatcctgttctactctatccagcagctcaccctccttgaaattcttcaaggtcattactctgccacaatggtgacatttcatcataactctcggcagtaccggataatttctgttacctgtaaccatgtatgaaactttcatactctttttgcacttcttacaataaaaatctataacttttaactctttgttcaattcagttcgctccttattcatacaaaatcatcaatctacaattctgtactcgtaaaggaaagggaaatcacctttgcaagccttttgccgggagttccgatgaatgtctgcacattccccggctttgctgatctaaagccaactgatatgaattgtgctgtcagcacacaatcacatcaggctccggctctttccataaaccacatattgttatcttcatagaaaaggaatatttcctttccatctaccacacaggtataacgctctccaacgccgccagcccttgtactggcagctctgcgcttgtcttttactcgtgtaatctcatactttctgccatcttcccacgttatctctttgggaatgagcagtccgtcctttgaaaactctgcaagtacatcaacatataccttattgctcaatgtaatcaccttccttacaagattgctattgctctggaagcatccatcttccttgctatatagcctttttcttctaatattttcagatgtgcataaacacttgaagtcgatgccacccctaccatcttgcatatctccctgatagtaggagcataaccattcacacgctgatattgcataatgctttcatacacattctgctgcttctccgtcaatggtgctctgtctaccagatcaattcttgctgcttcgctcatgttccgcctccctcttttttactctatcgctactcgtagtgcagctcaattccgcttcgcttcatttcgctcacggcagtcgccgtatcagataaccaagtcccatatgtttatgtgcaagcacaac

SEQ ID NO: 5246 - DNA, 415 bp, Unknown
  gut microbiota DNA sequence
gactaccgggtcttatgggaaatgatgcaccgcaggtgggacattgaggagaatggtttccatcaattgaaaacgtattatcacgcaaagcactgttactgtcgagatgcggttgaaaccatatttaatctgataatcataggttttaatgtaagagagttatatttgtaccgaagaagccggaactttgcaggaagtggtataagccgaaagagcataaaccggattttttgcgatgatctgctaacagaaaaagtgaaacagattttatgtgaaaaaggcggatagaaaatcaccagaaaaaatatatagggaaaaagcagggggaattttgcgcgtattgaccaggaacgaagggtaaccgcagatggaatgctgataactggattatttataaaaatgcatagataaaaaa

SEQ ID NO: 5247 - DNA, 1105 bp, Unknown
  gut microbiota DNA sequence
gtatgttaggttacttaggatgcgaagtgacaacacttggaaatcatgagtttgattaccgttccaagggacttgcaaatatgttaaacagtgcaactgagtcaggagataatcttccggcaatggttgtctgcaacgtggactgggaatccatggaagcagcaggattgagcgaaggacagcagcagattaaggatgcgtttgacgagtacggtgtcagtgattatgttgtgctcgaaaaaggcgatacggatatcgcagtcgtaggtgttttcggtaaagatgcacttgcctgtgcaccgacctgtgaacttttattcaaagatccggtggaagcagtcaaagagacagtagaagagatcaaggaaaacgaagacgtagatatgatcgtctgcgtttcacatagtggaacatgggaagatgaaagtaaatcagaagatgagattttagcaaaatcagtgccggatcttgatctgatcttaagcggtcatacacatacaacattagaggagccgatcgttcatggcgatacttatgtcgtgtcctgcggagagtacggcaagaaccttggtgagctttccatgacacagaaagcggacggacgctgggagatgtcttcatatgaactgataccgatcacaacagagatcgcgcaggatgcggacacccagacaaccattgaccagttcatggatacggtagataccgattatctggcacagttcggttataccaaagatcaggtgttagtggaaaatgatgttgatttttccacacagaaagatctggaaaatattcatgaggaacacaacctcggcgatattatgtcggacgcctatgtgtatgcggtggaaaatgcagccgattatgacggtgttccggtggatgttgcagtcgttccaagtggaacggtacgtgatacttatgcaaaaggtgacattacagtagagcaggtgttcaattccttttcccttggaatcggtgcagacggagtgcctggctatccgctgatcagcgtgtatctgaccggaaaagagttaaagacagcagcggagatcgatgcatccgtttctgattttatgacaacggcgagattatattgcag

SEQ ID NO: 5248 - DNA, 63915 bp, Unknown
  gut microbiota DNA sequence
atcttccaacggttcaaccccattataaaaaataacaaactggggaaacggcagcgaaagcagctttttcccgtaaatgttcaggttattttgtttaatgtagctctcatactgtttgccgaaatagatcagtccgcggatcggcatgtttgggtttaaggtactctggtgttcatacagatttaatgtaccacggacaataaatgatacatcatttttatatccgagatagatcacgtcatcgatcgtgtaaaagatcagttcatctgcatcgtcataatctgtctgattcagggcattgtataactccagcaaaaccggtttctcattaaaaattctgcggaataaggcatcccggtacttcttctgcacaaaaacatgttttgtgtgactgcgttttcctttgtttttccccatgtagttttctcctttgattataaaaaatttaaacgtttttcacaatagttttctgaaatagctggcgaaatgccggaatgaaaaagagtgatattcagaaaatgatcttatggaaataaaatcgaattgcgatagatgtagtatacatggggaaatcataaattgcaagaagaatctgccgttgtatggattcacatagacaaatcaaaacgaattgtttatacttgatttatgacaacatcacccaaaagaggagaaatcaatgattttatattttgtacgtcacggagagacggactggaatgtaaaaaagaaaatacagggcaagacagatgtgccgttggatgagaatggaaagcagcaggcaaaagagcttgcggacatgcttctggatcggaaaaaggaagggactcttcaggttgtgcgggcatatacatccccacagcttcgtgcagcacagacggcacaggaggcggcgatcgcgcttgatattccatgtattgcggcggatggtctgcgggaaatggatatgggcgactgggaaggcagaagctgggaaagcattacgcaggaaaatacgaaagagtatcaggactgggatgccaacaggcgttatgtccatacaccgcatggagaatgttacaatgaagtgctgaggcgtgcgcttgatacactcggaatgatcttagaacgggagacggaagatgtgttgatcgtaacgcatagtggcgtactgatggcattgcggtgttatattgccggacagacatttgaggaaatgggtatcatacggtataagacgaaaaatgcagaggtggttgaaatttttgcggatgacgtcaaggacgcgatcgcacgttttaaaaaaggggagtaaaacggtcatgatcgtgcaatcacggaaagcagtgtgaaaaatagactttggatgtgcaaaaacatagcgcaataacagagattcgtatgaatcagatcaaaaatgtaaaaactgtcggaagaatcgtattctgtcgtggaaacagagacgattcttccgacagtttttttgcactttccacaatttttaaaatgaatttttgtgaatgattttgactgattttgattgactgtgacggaatggaatcatataataaagctatcaaagatgaacgaatttgaacggttgtgaatgaaattggaggaaaagatatgctgacagaagaaagatttacaagaattttatccatactagagagtatgggcagcgtgaccgttcagcagcttatgacagaactggatgcatcagagtcaacgatccgcagagatttaaatacactggatgcaaatggtcagctcattaaagtccatggcggtgcaattttaaaaaacaccgcatacagtaccgaggatgacgaagtcatgcagcgtagagaacggaacaaaggagcaaaagaaaagattgcgcaatatgcggcaggtctgatcggaccgggtgattttgtttatattgatgccggcacgacgacagatctgatgattgattttattacggccagacaggcagtgtttgtgaccaatgcgatcacacatgcaaaaaaacttgcacagaaaggatgtacggtatatatcctcggtggagagtttaaagcgataactgaggcgatcgtgggagaggaagccgtttcatcggttgaaaaatacaattttacaaagggattctggggagcaaacggaatcagtatgcagcgcggattttccacaccggagctgaaggaagcactcgtaaaaaaacgctccatggagaactgcagagaatgttatatcttagcagatgacagcaagttcaatcagatatcaagtgtgacatttgctccgtttgagagtgcaaaggtcatcacgacaggtcttacaaaacctgcgtaccgtaaatgtaaaaatgtaattgaagtataaaaaatacgaagacctgcggaacaaaaacgcgggaaaagcagaaaggagactgagaaaatgatttacactgttacatttaatccatcactggactacattgtgacagttccgcatttcacctgcggaatggtcaaccggacatcagaggagaagatttttccgggtggaaaaggaatcaatgtatccatggtgttaaaaaatcttggactggagaacacggcacttgggttttatgccggatttaccggaaacgaactggagcgtctgatcagggaaaaaggaatccgggcggattttattccggtaaaagaaggaatgacaaggatcaatgtaaaaatgcgttccgacgaggagagtgagatcaacggacagggaccggcgatatcagaagctgacataaaaacactttatgaaaaactggatcggctttcagatggagatgttttggttatggcgggaagtatcccggatgtgatgccgcagaccatctacatggatatcatgaaatatcttgcagataaggatttaaagattgttgtggatgcgacaaaagatctgctcgtaaatgtattacagtatcatccgtttttaattaaaccgaataatcatgagcttggtgagattttcggtgtgaaaataacagaaaaagaagatgtgatcacttacgcaaagaagatgcaggaaaagggtgcaggaaatgtcctcgtttccatggctggcgacggagcagtgctggttgctgaagacggcagcatctttcaggcggaggcaccaaagggtaaggtcgtcaattcggttggcgccggggactccatggtagccggatttgtaacaggttatttaaagacgggaagctataaagaagctttccagatgggggtttgtactggaagtgcatcggcattttccgaggaactggcaacagaaccggaagttttggcgcttttagataaaaacaaaggcatatttaagtaggaggagtaaaatcctctgctcctgcaagggcacatgctatgcaggcatagcagacattttgctccgtaaaacaaggaggatttaagcatgaaaatcagggatttacttgccgtagagagtattgacttaaatggcaaagtcactggaaagaacgaaacccttgatgcaatggttgcattgatggctaagagcggaaagatcaacgatgttgagaagtaccgcaagggcgtatacgccagagaggaagaaggaacaaccggaattggtgagggaatcgccattccacattgcaagtcagatgcagtcagcaaacctggtcttgcagcaatggtcatcaaagacggggtggattttgatgcattagatggagaaaaggtcagcctgatcttcctgatcgcagcaccaaatacggaagacaacgtacatctggatgtacttagcaagttatctgttcttctgatggatgagaattttacaagcggacttcgcaatgcaaagacggttgaggaatttttaagtgtgatcgaccgcgcggaagctgagaaagatgccgaagaagagaaaaagaacagcgcagatacaaagaatgcggcagaggagaaaaacacagagaatggaaagctgatcctcgctgtaaccggatgcccgaacggaatcgcacatacttatatggcggcagaaaatattgagaaaaaagcgaaagagcttggatgccgtgtgaaagttgagacaagaggttccggcggtgccaaaaatgtattgacaaaagctgaaattgcagaggctgcatgtattattgttgcagcggatacacaggttccgatggatcgttttgcaggcagacctgtgatccagtgtaaggtttctgatggaatcagtaaggcggaagaattgttagacagagcgttaaacggcaatgttccactgtatcaggcgaagggaagcggtcaggcagcagacagtgaggaagaatctgacagcgttggacaccagatttacaaacacctgatgaatggagtttcccatatgttaccgttcgttatcggcggtggtatcctgattgcgatcgcatttctgatcgatggttttgcagttgacttaaacagccttccatttgatgagcgttcaaactttggtacgatcacaccgatggcggcaatgtttaaatcgatcggtggtgttgcattcggatttatgcttccgatcttagccggatttatcgcaatgagtattgcagatcgtcctggtcttgcggtcggttttgtcggcggagcaatcgcagcaaacggaacatccggattccttggagctctcgttgcaggttttgttgcaggctatctggtacgtctgttaaagaaactgtttgagaaactgccggaaggcttagagggtatcaagccaatgcttctctatccggtaatcggtatctttttgatcggagtgatcatgacttatgtggtagagcctccgatcggagcattaaacgttatgatcaacaacggattaaacagcatgaatggtgcaaaggcaatcctgcttggcgcactgctcggcggaatgatgtccgtagatatgggtggcccggtaaacaaagcagcatatgtatttggtaccgcatctatcgcagcaggcaattacaatatcatggcagctgttatggtcggtggtatggttccaccgcttgcaatcgcacttgcaaccatgttctttaaaaacaaatttaccgaagaagagagaaaagcaggaccgacaaacattgttatgggactttcctttatctcagagggagcaatcccgtttgcagcatcggatccattgcgtgtgctgccgtcctgtatcattggttccgcagttgcaggagcattatccatggcatttaactgtacattaatggcaccacatggtggaatcttcgtattcttaaccgtaggccatccgctgttatatctcatatcactggcagttggttctgttgtaggatgcgtaatccttggacttttaaagaaggatgtatcaaaaagataggaaacggaaaaggtaattaaaatcgcaggctttatgttgcaacaatatagagcctgtgaatatgtaatcataaaacaatgtgttatgtacaaagaaaggagaaaatcatgaaagaatttaaatacgtgatcacagacaaagggggaatccatgcaagaccggcaggagcacttgtaaaggaagcagccgcatttccatgcagcattaccattgcaaaagatggaaaagcagcagatgcaaaacgtatttttggagttatgggacttggtgtaaaatgcggcgaggagatcacagtctgcaccgatggagagaatgaagaggcagcaagtgctgcaatcgaggcatttttgaaagcaaatctgtaaaaattgataaaaacagaaataaaaatctaaaatggaggtaacgggcatggaactgcacggaaaaagtgtattcggcggaattgccatgggcagactgtctgtctatcataagacggataacgcagtaaaacgaacaaagataacggatatagaagcagaaaaaaaacgttttgaggatgcaaaagaagaagccaaaaggcagcttggtgttttctatgaaaaagcagtcagggaagtcggtgaagtcaatgcggcaatttttgagatgcaccagatgatgctggatgatctcgactatgtagagtcgatcacaaacatgatcgaaacccagcaggtcaatgcagaatttgcagttgcttccaccggagataattttgcgcagatgtttgctgcgatggatgatgattatatgagagaacgtgcggcggatgtcaaagatatctccaatcgcgtgatctctattttacagggaaacggcgatgcaggcttaagcggtgatgaaccgtttatccttttagcggatgatcttgcaccgagtgagactgtgcagcttgataaatcaaaagtacttgcttttgtaacacgtcacggttccaccaattcccacacggcgatcttagcgagaaccatgaatattccggcattgatcggagttgattttccggaagagggtgtggacggacagttcggtatcgtggatggatttgatgcaaagtttttcgtagaaccggatgaggatacgaaagcggaataccggaagttaaaagaagaaaatgagcagaagaaacgtctgcttcaggaattaaagggtaaggaaaatatcacaagggatggaacgaagatcaatctttatgccaatatcgggggtgtttccgatgtggcaaatgtacttgccaatgatgcgggtggaatcggactgttccggagtgagttcctttatttagagtcggaggattacccgacagaagaagcacagtttgcagcatataagacagttgcggaaaatatggcgggtaaaaaagttattatccgtacacttgatatcggagcagataaacaggtcggttattttggccttgagaaagaagaaaacccggcaatgggttaccgtgcgatccggatctgcctcgaccgcactgaaatttttaagacacagcttcgggcaatctaccgtgccagctattatggaacgattgcgatcatgttcccgatgatcatttccgtaaatgaggtgaaaaagatcaaagaaatcattgcggaagtgaaagcgggacttgatgccgacggtattccgtataaggatgtggaactcggtattatgatcgagacaccggcggcagttatgatcagtgatcttttagcgaaagaggttgatttcttttcgatcgggacaaacgatctgacacaatatacacttgcaatcgacaggcagaatccgaaactggataatatttatgattcacaccatgaagcagtccttcggatgttaaaaatggttgtggataacggacataaggaaggatgctgggttggcatctgcggtgagcttggcgcggatgaaacgctcacagagacattccttcggatgggatttgacgagctttccgtatcaccgtccatgatccttcggatcagggataagatcaggaatacggatttgtcagtgaaataaaagtgcatcagggatctgcagcgtatgattcgcatgcagatccttttttgtaggataacgctataaggtgtcggcatgattgtcagttgtgcggtgaaatgggcatatacagcagaaacgctgctgttatgcttatttttttgtgtgattttgggcataatcacaaggtttttcctgtatatggaaaatgaggagccggataaaaagaatacatggtataatgttggtatgatatgggaattaattatgtaagacagaaaggcgcaaaatgcggattctgatcaaaacaacggtaaacaggatttttacagtcaccggacataaaacaggaggcacacatgagcaattacttactgatcaaacagggaacgatccacaacgccatagagaaagagccatttgtggcagatattttagtggagaatggaaaaataaaaaagatcgcaccggtcttagaggggaagatcatcaatgacgcggatgtgatcgatgcaaccgggatcgatgtttatccgggatttgtggatgcgcactgtcacatgggattagacgggtatgcgaccggatttgccggcgaggattataacgaatcaggggatcctgtgacaccgcagctctccgcggttgatgcagtcaatccgcaggatgagactttccagatggcacgcgaaggcggtgtgacctgtgtgtgcaccggaccgggaagctcaaatgtcattggcggaacattctgcgccatcaagacctacggaaagcgtgtggatgacatgttagtcaaagaaaaaacagccatgaagatcgctttcggtgagaatccgaaaaactgttataaggaaaaaggtgtttattcgagaatgtctgttgccgcgaagctgcgggaggcactcacaaaggcaaaaatatatgacacaaaattacacgctgccggctgtccggagggctggaatgaacttgagatggaacaggcacaggaacaagtgatggacgattcgcagaaaacagacgcggataggaaggtggatttttcaaagatgcctgcttacgatgcaaaaatggaggcgcttcttccagttatccgcggcgagatgccgttaaaagcccatgcgcaccgcgccgatgatatctacaccgcaatccgcattgcaaaggaatttcatgtggatcttcggattgatcatacaacggacggagcattgatcgcagatgatcttgcaaaggaaggatttccggttgcggttggaccgtcttttggacatgcaaccaaatatgaactgcgccacaaaggatttcatacccctgcggcacttgcaaaagcgggatgtcaggtttctatcattacggattccccggtgatcgaggagcgctatctggcactttgcgcaggaagggcggtatttaacgggttaagtgaatttgatgcgttaaaggcaatcacgatcaatgcagcgaaacatatcggaatcgaagaccgtgtcggaagtattgaggcgggaaaggatgcggatttcgtgttgacgggggaaaatccatttgctgtggatactcatattttgtatacgatcattgatggaaatgtggtgtacgagggcggggaagcgtaaacggattgtgaaagtgcactattgtataattcttccatgtctgatatgatgatgcaataactatagtaccagatataaggtacaatcgcgggaggataccatgataaaaagaaaaaattggacgaaaaagatgttggcggttgcggcatgtgcagggcttctgatgacgaacccggcgtttactgaagctgcaacagcggcagaacgcagcgcatatcaggcagtttttgatgcagattattaccgcagtgcatatccggatgtagccgctgcttttggcaataataaagcagcactttttaatcattttgtaaattacggattaagagaaggaagaagctgttctgcggatttcaatccacaggcataccgggcaaaatacgcagatctgcagcaggcatttggtgacgacatggcagcatattgccgccattatgtgacatgtggtaaggcagagggaagagacggaggcggaacaggaagcgcatccgctgctactgttactgatgcagctacaacggatactgccacggtacagggcaatgtgatcggtacctgtacaacagaatatgatgcgacagttccgagagctgttaacgtagagctggcagcagcccgcatcaatggtgttgtagtacagccgggaaaatcattttcctttagctcgactattctgccgcgtacatcagcgaacggttatgttgtagcaccgatctatatcagtggaacggtcggcacgggaaccggtggaggtgtgtgtcaggtgtcatcgacactttatgccgcaatgcggtatgccaatcttccggcaacggagcgttatccgcattctttgccggtaacttatcttccggatggatatgatgcagcaatcgcgggaacgagcaaagatcttaaatttaccaatacattttcacagccattactgatccaggcatctgcgtcgggcggcacattgacggtaacacttacattacaatagaagagagaatttatgcggattttagtagtaaacgatgatggaattaaagcaccgggcataaagcgtcttgtgcagatggcagcaggacttggcgaagtatgggtggtggctccggcagcacagtgcagtgccatgtcacaccggatcactgtgcgtggcgatttagaggtaaaaccgtatgattttccggccacaggtgtgacggcgtacagtgtgtggggaaccccggcagactgcgtgaaagtggcacttggatgtctgatgacagaaaaaccggatatcgtattttccgggatcaatgcaggctataacgttggacgggatatcttatattccggtacgatcggagcggcgatggaggctctctgctggggtgtcccggcgatcgcattttccgttgcggaggaagatgagtgtgaggttttaaatacatatttagaaccggttgcaaaagaactgatctccaaaacattaccgcaaaatgagatctggaacgtcaatttcccgggatgcactttagaggaatacaaaggaatcctgtgggatcgtatcccggatcagaaccagtattaccgggataactacaagagaacggacagaccggacggaagctgtattttttcagcggcagggctgccggaaacggaagcggcggatggaacggatgcgggagcagttctttccaattacatatccatcggaacaatcaaaaatatgatcatataaaaaaggaaaaaacaggtttgtttttcagtaaacgggagaatatttatcagcagaattaatgatttttattaacgtacctgataaatattctctcttttgtataaactgggtaaaattttagtaaaactttactaaagctattgaaatctgcaaaatcgtgaaatataatgcagaagaaaggcgtgattatatggcaacaatcaaagagattgccaagctggcacatgtgtcggcggcaacggtgtcgagagtgttgaatcaggatgagacattatctgtgacacctgaggtaaaaaaacagataattaaaatcgctcatgagttgaaatatgtcccgcctaagatgcgtcatgccaaacgagacagacagatcgtcatcggagttgcggactggcatatcgtaagaagagacagaccggatgtgagcattacatcggaggatatcttatccggaagtattgcgcagaaagcagatatcgcctttttacgtctgatttatggagaagtaaaacaggtggacggtatcattgcatttggtttattctcggaagtggaagttgattttttacgatcactaagcacggagatcctgtttgttaattcagataaaaaggattatgagtttgatcagatcctcatggattacgagcagggattaagcgatatggtgcattatctgatggacgagaaggagtatcgcagcattggttatattggcggtatctatgaagatgatatggtgcgtatcggagtgcgtcgtctgaatggattaaagcagatcctgcaaaaaaaagactgttatcgggaagactattttaaggttggagagatcagtcatgaaaatgggtatacactcacaaaggaaatgcttttgacgaaggatgtgccggaagttcttattttaggaaacgatgaggtcgcagaaggggcattagaggcgatcaaagagttaaaattccggatccccaaagatattgcggtggtgatttaccgtgatattgagacactttcgacgaaatatccgacgtatacaagtcttcgcatgctgcctgatattgtatggacgactgccataaaacttcttttggagcggatcttagatggcaggaaagatacgatgaaggtatatctgccaacaaagcttgaacttggagacagtgcctgatcattggctggacaattcatgaaaagagcaacaacaaaagtgtgcacgcctgcatgggaatggatgcaggagagagaggagaacatttcattatgaagaaaaaaattgctatgttacttgcagcagcattatgcatgggtacatttgcaggatgtggaaacagcacatcaaacaacagcagcgcagcagacaacaatacgacaaataatacggcagctgcaacagaaagttctgacgtgacagcttctgctgataacgtaaagatcgatacgttaaacgtatatttcgttccatccagagatccggatgagatcgtaactgcaacagagccgcttgcaaatttaatgcagacagagttagcaggcttaggatatgatatcggagaagtaaagattaccgttggtacaacttttgaggcagtaggtgaggcacttgcagcaggaactgctgatgttggatttattccgggtggtacctatgtactttatgatgatggagcagatgtgatcttaacagcaaccagagatggtttaaataaagattcggacaaccctgcagactggaatgacggacagcctacagaaggtactgacaaacaggcagtttcttaccgtgcattattcatcgcaggtccttctgacaaaggacaggaacttgctgataaagttaactccggcgaagaacttacctgggatgatttaaacggcgcaaactggagcgttatgtcctcctcctcaccggcaggttacatttacccggctttatggttacaggacagataccagaaaggtattacagatctttcttctgcagtacagtctgattcctacgcaagtgcatttgcaagacttgcttccggacagatcgacgtacttgtaacttatgcagatgcaagacgtgactatgaagaaagctggacaagtgaatttggtcgtacaaaatctatctgggaagagacaaatgttatcggtgtaacagatccgatctacaatgatacagtctgtgtcagcaagacatctccgatcatggatgacggcttaaaatcagcaatccagacagcactcatcaatatcggtaacacagaggaaggtaaggcagttatctctatctacagccacaacggatatgagccggcacagtcttctgattatgataaagagagagaagcacagaaactgatccaggaattaagtgcagcaaactaatcgttactggaacgtctgacagggagtggacagtaacaacgaaataataacaggcagtatgacgggcagcaggagggctgctgcagagccgggaaaccggctttgcggcagcctttcaatgagtatacacctataaaaaacacacaccataaaaacagcaggtaaaagaaaggtttggtttaaatttatgatcgagtttaaggacgtatcgaaggtatatccgaacggggtagtgggactggataatgtcaatttaaagatcgaacagggtgaatttgtagcgatcatcggtctttccggtgcaggaaagtccacgttactgcggacgatcaaccgtatgcatgacatcacatcaggaactctgacggtggatggattagaggttaaaaacttaaaaggaaaagagcttcgtactttccgcagaaagatcggaatgatcttccagtcattcaatcttgtcacacgaacaacagtaatccgtaacgtattgatggcaaaagtgccggaaatgcctttctggagagttctgcttggtgtgtttaaaaaggaagacaaaatgcaggcacttgagagcctggataaagtcggtattctggataaagcatatatccgtgcagatcagctttccggtggtcagcagcagcgtgttgccttagcacgtacacttgcgcagaatccggagattatcttagcagatgagccggttgcagcacttgatccggtaacggcaaaacaggttatgagtgatttcagaaagatcaatcaggatatgaacatttcaatcctgatcaacatccatcatgtggaattagcactcgaatatgcagaccgcatcatcggaatccgcgccggaaagatcgtctatgacggaccttccgagaatgtgacacaggacgtgttaaacacaatttacgaaggaaagattccggagaaaacggaggaagcgtaatgggattgtacgataaaatatttaaaccgaaaaaacttgtgcttgcaaacggcaaagttgtggaagaaaaatgttcccgcgcgccgctcattattattctgatcgtgatcgcaacatggatctctgtgaaagttacaggtttttccatgacaacacttgtgacgagaatacggtttttctttgacattttagcgcagatgttcccgccgaaagccggctacatctcaagtatctggggaccactttttgatacgatcaaaatgtctctgctcggctcttttgtgggtggtgtgcttgcgatcccttttgcaattttagcatccagcaacctgatcaaaaataaagttgtgatcggtgtggtccgcgtatttttaagtatcgtgcgtacgattccgacgctggttgcagccctgatcgcaacctatatctggggacttggcaccatggcaggtacctttgcaatcgcagtatttacttttgcttatgtcggaaaacagttatacgagatgatcgagacggtcgacatgggagcttatgaggcaatggaagccatgggtgcaggaaaggcgtactcctttatttctgcgatcatgccgcaggtactgccggcatatatgtcagtctgtttattctgctttgagggaaatgtccgctatgcagcgatcttaggttacgttggagccggcggactcggtctgatcttaaatgaaaagatcggctggcgtgagtatgacagtgttggaatgatcctgatcgttctgtttggtacagttcttattattgaagcaatcagccattatatcagaaagaaattaacgtaggaggaaccggcaaaatgaatgaatcaatcaaaaaaatgtacgagcaggaaccaaagacctggtacgcaaagatcattgtggctttgattgttgcagcgcttcttgcatggtcactttctacggttcagtccaccggatcaaacggaagcggactttccgtcgcaggaaagatcatcagtggtattttccatccagacaccggattattgtttgacctttctacatccggagtggcatatctgttactggaaaccatgtgtatcgcattcttaggaacgatcgttggtgcagtattatccattccgctttctttccttgcggcagcaaacctgatgccaaagccggttgcgctgatcttccgtgtgtttatcatggcgatccgtacgatcccggcatttgtatacggacttatgtttatccgtgtgacgggaccgggaccattcgccggactgctcaccatgtcactctgttcgatcggtatgatcagtaaaatgtttattgagagtatcgaggatctggataccaagatcttagagtcactggatgcagcaggctgtacgatgttccaaaagatccgttacggtatcttatcccagcttttcccggattttatgtccacgctgatctatcgttttgatatgaacttaagagatgcgactgtacttggtctggttggagccggtggtatcggtgcaccgctgatctttgccatgagtgcatacaaatggaaccaggtaggcgccatccttgcgggactgatcgtgctgatcttaattattgaagtcatctcctcaaagatccgtacaaaattagcgaggggttagtagtgcgaaaaatccatatatgaaagattttacgcacacaaatttgagtcgcatactcaaatttgcaggttattgaaagggataaaacatgcagcagaaaaagttaaaagtttattttacctcagatgtgcacggatatttttatccgacgacttatggggatatggatgtaaaaccggtaggactttttggctgtgcggcagattttaacaaggatgatgagacactcatcatagatggcggagatattttacaaggctccgcctttgcttattactgccgtcaggttgcagactctccggaagtgatcgcagatattatgaacgactgcggatacgattattatacacttggcaatcatgactttaattacgggcttgaatatcaggcagcataccgcagccggaacaacggtgtatgcgtctgtcagaatattacggatgaagcgggaaacacattgttcccgtggaaactccatacgatgaaaaacggactgcgtgtcggcatcgtgggtattgtgaccgattatgttaatatctgggaaaaagaagaaaatttaaaaggaattcacatcacggatccttttgaggcagcaaaaaatgcacttgcgcagatgaaagaacagacagaccttacgatctgcatctatcacggcggttttgagtgcgacttagagagcggagagacattgtcccagacgactgaaaatgtcggataccgtatctgtaaggaactggattttgatattttactgaccggacatcagcatatgtccgtgccgggaagggatatatccggtacttatacggtacagccttgtgataatgcgaaggagtatcagtatctggaggttacgatgacagatcatgaaaaaagtatccgctccgaactgcgtcagtcagacgcggcaaagggaacggtgcttgcggacaagtaccgttccacagaaaatgcggtgcaggcatggctgaaccagccgatcggtcatttaagccgcgcgatcctgccggaagagaaagtgaaaatggcattgtacggctcaccgatcgctgactttttaaaccgcatccagcttcatttttccggggcaatgctctcatcggtcggtctggcaaatgagatcgccggattccgcagtgaagtgagcacgcgcgatattattgcgacatatccatatccgaatacactcgtggtctgtgagatcaccggaaaacagttaaagaccgtgatggagcgcagtgcggaatattttgcttatgataaggatggaaatgtctgtgtttccgacagttttctgattccgaaagtcgagcactataattacgactactatatgggtgtggattttaagatcaacccggagaatccaatcggcagccggatcgagggattgtcaaaggacggaaaaccggttcttgatgatgataaatttacgatctgtctcaacaattaccgttacagcggtgccggtggatatgatgtttacacggagtgcccgctggtcaaagagatcaatgttgagatggtggaactcattatggattatttccacgaatatccgtatattgaggtgtgatgtatcacataatggacttgacagaatgccaggtttgaaatataatcaagacagcgtgttgaagagaagagtactgatcggaaattttaaagagagagatacattttggtgcgagtatcttaagatggaacatcaggaagaccacctctgagcggccctaattcggtccggtgattccgttatcatcaaaatgagagattttccacatggaaataaacggggtggaaccgcggataaaagattgtttattcgtcccttatacagataagttgtctgtataagggactttttagttcaggaaaaggagattgatcatggtagattttaaagaagatgagagactgaatacgctcaaccattcctgtgcacatgtgatggcacaggcagtaaaacatttatatccgaacgcaaagttctgggtaggacctgttgtaaaagaaggattttattatgatatcgatcttggcgataccgcagtcaatgatgatgtgatcgcagcgatcgagaaagaaatgaaaaaagtctgcaaagaaggtaaaaagatttacagacgtgagatctcaaaggcagaagcattagagctgttcaaagatgatgagtataagcttgacttaatcgatggcttggaggatggaaacatttccgtttacgatcagggcgatttcacagatctctgccgtggaccgcatgtcgacaataccaagttatgtaaaaactttaagctgatcaaatattccggtgtttactggaaaggtgatgcaaacaaccatgtcatgcagcgtatctacggtgtatgtttcccgaccgcagaagaattagaggagcatttaaaactcttagaggaagcaaaagaccgtgaccacagaaagatcggcaaagagatgcatctgttcatgtcggatgatctggttggacgtggacttccgatgttccttccaaagggatataccgtatggcaggagcttgagaattatatcaaagcaaaagagcgcaaacttggttatctgcatgttatgacaccttgtgtcggtacggtaaatctgtacaagacttccggtcactgggatcactacaaagagaacatgttcccggcaatggaagttgagggagagtctttcgtactccgtccgatgaactgcccgcatcacatgatgatctacgcaaatagaatgcattcctataaagatcttccgatccgtatcggtgagatcgcacatgacttccgttttgaggcaagtggaactttaaagggtatcgagagaggaagacatttctgccagaatgatgcacatttatttgtaacaccggagcagatcgaatcagagtttgcaaaagtggttgagctgatctttgatacttacaaagatttcaatatcacagattaccgctgtgtactctccttaagagatccggaagataaagtaaaatatcatgatgatgatgagatgtggaacaatgcagagaatgcactccgtaaagtacttgacgatattggtatcgagtacacagaagaaatcggagaggctgctttctacggaccgaaacttgatgtaaacgtgaaaccggcgatcggtaatgagtatacactttccacctgccagttagacttctgtctgccggcaaaattcaatctgtcctatattgacagtgacggaacaaagaaaacgccggtcgttttacacagagcgatccttggttccctcgaccgtttcatggcatatattttagaggagacaaaaggaaacctgccgttatggttagctccggttcaggctaagatccttccggtaaaaaatgaggatgaggaacttaacgcatactcacatgacttatacaaatatctcgatgataacggaatccgtgttgagatcgatgagagaaacgagaaactcggctaccgtatccgtgaagcacagatggagaaagtgccgtatctgttagtacttggtaagaacgaagcagctgacggaaccgtaagttacagactgcatggagagcagaattccaccacagtttccagggaagatttccttgcactgttaaaagaggatatccgcacaaagaagatcaatcctgcagcattaaaataaacagaaatatgaaaatgcggtgtgtccggcaggatatgccgtatttttttaaattcataggaaattacgtcctatgaatttaaaaattcatgactggaatacaccagacaggaaacaaaagcctgataaattgtcaaagatgtatattgcaatcaaaattaaatgatagtagaatgaaaccaatataggaccgtttatgagaataaatcagaaagaacaaaggaggatattgatgtgaccctaagtggaaaagtatcattaaaggtaaaaatgacgattctgattattgagattttaataatcggatcatatggagtagttgtcggagataaaaatatgggtgctatccgtaatgatgcgatcgccagcatggaagaatatgtaagtgaggaacatccggaatattcccaggaagaaatacaacaggaactgcagccgatattgcagaaaatgcagcaggaaaagaaagcaaaacaggatcagtttttctattttatggttattatgtgtatactcacggatatatgggtactgtatcttacattcgacattacatcgggcgtcaaaagatctgcgctgtttgccaaaaaaatgggacagggcgattttacgcagcgtgtggaggaaaaatacctgaaacgtgaagatgagatcggtattctggcacgcagcatccgtgacattcatcacaatatgagacatctgatcggctatgtacagcgcgaagcggatacattggatgaaacggttggaacagcagagacggcactggcaaaacttgcggacgagatcgacagtgtatccggtatcacgcaggaacttgcagccggaaatcaggagaccgcagcagctgcacaggaagtgaatacgatgtccggagagattgaggaagctgcaaaaggaattgcagagcatgcgcaggagggaaacggaaaagttgacgagatccataccagagcggctgatacgaaacaaaaaatcagtgcaggccgtgcaaatataaggaaagtgcatggggaaatcaatgagagcttatcggaagcactggaaaatgcaaaagtcgtggagcagatcggtgttcttgcggagtccatcatgggaatcacttcgcagacaaatctgctggctttgaatgcatcaattgaagccgcaagagccggagaggcgggaaaaggatttgcagttgttgcagatgagatccgtaatcttgcggagcagtcggcgagcacggtcgggaatatccaggaagtgacagagcgtgtccagacagcagttgcaagactgaccacagatgcaaaacgtctgttagagtttgtgggaggagacgtcacggagagttttaatgattttgaaaaaatggcagataattataatgaagatgcaaactatgttgaagaacttgtaacggatttcagtgcggcatccgaacagcttttagcttcagtcagcggagtggttgcaaatatacaggaggtaacgaaagctgcgaatgatggtgcggcaagtaccggaagcattgcagagcgtgttaccaatgttgacagacaggcagaagatatgcgtgtactgatgaaacagacgcaggaagcatctttgatgctgcggaaggacacaaagaaatttacggttgcatagacaggatcaatctattgtaaaaaatattttggataaagtgaaaattaggactgcaccaccatttactaattttaaaagttcaagtaaaatataagtaaaattatgctttgtaaaacagggagacttatatgttacgggaaaagattaaaaattggaaaatggaactggctgcagtccttgtttttgttctggttttgggaatgacggggctatccggcagtgtgaaggcggcagaccagacggacttgaaaacaatagatatcatgttcgtgcatgacacacattctcatctgaacagcttttcaacggtagtagatgaaaaacaggaaatgatcggcgggtttgcaaggattaagacactgatcgatgaacagaaagaaaaagacccggatacactggtggtggatggcggagatttttccatgggaacgctggtgcagaccgtttttgagacacaggcggcagagattcggatgttaggggcactgggctgtgaggcgacaacacttggcaaccatgaatttgattatcgttcaaaggggcttgctaagatgcttgaaaccgcggcggaaagcggagataccgtgccggagcttcttgtctgtaatatcaactgggatgccatggaacagcagggattctcagaaggacagcagcagatccgtgatgcatttacggaatacggtgtgaaagattatgtgatggtgcaaaagggcgatgtccgggtggcactgcttggcgtattcggaaaagatgcactggcatgtgcaccgacctgcgaactgcagtttacggatccggtggaagcagtaaaaaagaccgtagctgaaattaagaaaaacgaagatgcggatattatcgtctgtctttcccatagtggaacttcagaggatgagtcaaagtcagaagatgagattcttgcgaaaaaagtgccggatctggatgtgatcgtcagcgcacatacgcatacgaaactggatgagccgattgtgcatggggatacttatatcgtttccgcaggtgagtacggcaagtatttaggttccttatccttagaacaaaaggatgatggccgatggaacatgaaagaatataaacttacttcaatcgagacggacattgcagagaatgctgctacacaggaagaaatcaattcttttatggcgacggtggataccgattatctggcacagtttgggtttacgagagaacaggtacttgcggaaaatgatgtagcatttgacagcctggaggatctctacaacatccataccgagcataatctgggggatctcatcgcagatgcctatgcttatgcggtcacaaacagtacggattataatggcactcccgtggatgtggcaatcgcgccgagtggaacgatccgtgacacctacacaaagggaaatattacagtagaagatgttttcaattcattttcacttggaatcggtgcagacggtgtgccgggttatccgctgatcgaggcatatctgacaggaaaagagttaaaaaccgtggcagagatcgacgcatccgtgtcggatctgatgacatccgcacgtttgtatatgtacggcctgcagtttacttataatccgcaccgtatgatcttaaaccgtgttaccgacgtgtatctgctggatgcagatggcaatcgcagggagttagaggacgataaattgtatcgcgtggtggcagatctttacagtgggcagatgctgtctgcggtgacgaaaacatcgtatggactgttgtctgttgtgccgaaaaaggcagacggaacaccgattgaaaattttgaagatgtgattttgacagataatggcggggaattaaaggcatggacggcgatcgcacattatatggagtcgttcccggatgaaaatggagatggaattgcggatattccacaatattatgccggattgcatgaaagaaaagtggtagatgattcggccaatctcataaaattaataaaaaatccgaacaaatatgccgtcatgatcgcaggagtcgtattgatcgttattttactggttgttttgctgatacggttagtgttaaaattagtaaaataccagacaggaaaaagacgcagcggaagtaaagcaggagaataaccatgagcgcgcaggacaaaacggaagaaattttaagacaaatgcatatattgcttgcaggcagtgaagcttatgacagtattggcagtaaaattatccttgataaaaaaagaatgttagagctgcttgcagagctaaataaggccatttacgcgatgctggatgagtatgaactgacaacgcggggcaaggagcgtgcaagacgtgaggcggcaaaaatcggagaagatatcttaaaagatgccagcgggaaagcggaggatgtgtatgctgcgtctgttatgtataccaatgaggcactgcggcatgtacaggaaatcatgcagagggcaacggatgccatgcaggagatttataaggatgccaatgaaaaacttcagaaagaaaaagatgttgtaaggagagaccagtcagacctgaaaggacatctgcagaatcttgctgatacggacaaatatctgaatctgatcgaggatcgtaaccgtgagattgaaaaagaaagggcaaaggaaaagggggagacagagccatcgccttattctgcgatcaaaccggaaattaagatcaaccaggagtattttgaaaaggcaggaatcgtgccggaaaatgaactgcccgaagaaattcccgaagatacgccagaggaagctgcgccaaaagcagaggtaaatgtcaatgtcaatctggatgcggaatatttccactggaaagagggcggggaagcttccggcgagaagaaaccggagaaacattctttcttctccagacatcataaagagtaaaaggagaatgtgatgttagagaagccggaggaaaaagagtttcacaaaaaatgggaaagcctgtatgtttttacgggacgcagaagtgacctgacaacgatgatttccattgcggtcataaatccaatgatcctgtatgtctttatcgggtatgtagcagggaaacggatcagtctgccggtgttgtatcttatcatcgatggagtattgtttttacaatggggactgctggtaaaaagacggaaaagaaagatagagcagtccatacaggatgtggccggacaaatggacaccatcagggaaaaaataaatgaactgggaaattaactgacaaaacagggagacagccttaatggccgtctccctgtttatatcctgtattagagatgatctgctggctgtttgaaagaactgttgcagatggggtataattttcatcattaaataaaaactgatgtaattgtgtaacgttagaagcaagatcgcacggaatgacaacatcgccgatcttatcatatttgtgcgttgttttttcatatggaaaaccggttgtatctccaatgtcataactgaaaacttttgtggcaagggcaaggagatccgtgttggaaaaactggtctgaatgtccccaaaagctgcgttgatcagtttgttgagtgtcagaatgttggatttctgcgctttctgcatcattgcggtcaaaacagtacgctggcgttcggttctgcggtagtcatcaccgccgccataacggattcgtgcgtaggcgcatgcctgtacgccgtctaaggtgtaagttccgccggaggcaggtggtgtggaattgtgtccggtcagttcatttaattctttcatataaccgatcatcagacttgcctcatcatcggtgatcgtgatgtcgacaccgcctaacaggtcgacacattcaatgatcgcattgaagtcgacggttacatagtcggtgattgcaagatcaagattggtatttaacatggacagtgcctgttccggtccgccctttgcgtaggctgcgttgcatttctggtaagtgccgtttccggtatctaaataagaatcacggtaaacagataccagattgatggtatgctgtttcgtatcgatgtttgccaacatgataacgtcgctgtttcctttggagaggctgccgttggaacggttgtcgagtccgaagagtgcgatcgttttgtaatgagccatcgcttcttttgtctcatcggagagatcgtcattgatggaaacgtcgttcatgtccagcttattcttttcaatttttgataatttggttgtgataaaaagggcaatggcgaggagcaggatgatcagcagctccagtagaaggagcatgatttttttctgctttctgcttttgcctgcagtgtgcacattttttttcataagaatcctccattttgtgtaaaacttattttatttacgggaaaactgtggaaaatctacggaattcctgtgtgtaccagtacgggtacgaaagatatcataaggcggggatgaataggatgcaataaagtatttcttaaatttaaggccaatttcttaaattaaattaagaaatgtgggaaatgttgtatatgcagtgggaatttaaaggaatattaagaaatccgctctataacaatttaaactttcctgttaaaataaatgtaagatctggtgtaatacttgaagtaagacacaaaaagaatggaggaacttatgcagacaattttagtgtgtgatgatgataaggaaatcgtggaagcgatcgaaatatatttacagcaggaagggtatcatattttaaaggcatatgacggcgaagaagcactggagatcttaaaagaaaatgaggttcatcttctgatcatggatgtgatgatgccgcgtctggacggaatccgtgcgaccttaaaaatccgtgaggagagcagcattccgatcattattttgtctgcaaagacggaggatgcggataaaattttaggacttaacatcggggcagatgactatgtggagaaaccgtttaatccgcttgaactggtagcgagggtcaaatcacagttaaggcgttatacccagcttggaaatgcggcagagagcagcgcatcggtgtatacagtcggtggattgtcgatcaatgatgatttaaaagaagtgaccgtggatggagaagtggtaaagctgacaccgatcgagtacaacatccttttattattggtcaaaaatcagggaaaggtattttccattaatcagatctatgagagcatctggaatgaggatgcgatcggagcggacaatacggtggcagtacatatccgccacatccgtgaaaaaatcgagatcaatccgaaggagccgcgctatttaaaggttgtgtggggcgttggatacaagatcgacaagaactgattctgggagggattccgtacgccggcatacaggataatgtccggcacggggatggagacttcatatggaaaagaaatcatacacatacggcagtaagctggcagggatgatcctgcacctgttttttacggtaatacttaccatcgctgtctatcttttggcatcactgatcagcaaaaatattctgcaggtaacggatatcggtacagatgatttttttaattcgggctactataccaaatgcatggagcagaaatgcagtgaactgaccgattatctgcatctgttacaaaaaggcaataagcggagtgcggaggacgataagcgttatctgcagtatacaaatgagtttaagcgtgaagacaccaatttctgttactggtataaacagaatggggtgtggtataccaatcagccggattcggtggaaggccaggagtttgatacacagactgttctcatggaggcaaagaccatgggggattatctgatctatgatatggagaaaaaggaatttggaacggatatccgcggcatggagaattacttttttgacagttataataaccagatgtatctgccactggaaaatgtggtgcttgtgatcggagtggatacggatctgacggcaaaagacgatctgtatgatgccgagatggagtatgtaagactgcatccgtggatcaaagtcagtattgttgctgcgctggtcagtctgatgggatgggtattaagtcttgtatatctgacacttgcaaccggacacagagatggggaagaaggagttcatcttaattttgtggaccggataaaaacagagatcgtgaccgccgtatttattgcagcaaccagtgagctcatcatgcttttgtcccatgtaaataataaaacgtggaacgtgtcgggactgttggtcgcatcgggaacggtcagtctattgattgatgtactgtttctcattttttatctgagcatggtgcgccggatgaaggcggaagtgatgtgggaaaacagccttgcctgctggtttgtaaaagggatggacaagttttttgaaaaacggacggtgacggtgagcgtgctggttgtctttgcagtccacatgatcgtctgtttcgtgcttgcgatgggagctttttattaccaccgggtaatctgtctggtactgcttttaatcttcagcggcatggaggcatatctcctgctgcgttctgcagtggaacattatcaggtatatgaaggcgtggaaaaaattacggaaggtgtactaagcaacaagatcgacacagaaggactgcatggtgaggataaaaaacttgccgaagcgatcaacaatattggcagcggtcttttgcatgcggtggatgacagtacgaaaaatgagcgcatgaaggcagacctgatcacaaatgtttcacatgacatcaaaacaccgctgacctcgatcattaattatgtcaatctgatcaaactggaacatattgataatgaacgggtgaatggttatatccggatcctggatgccaagtcacagcggttaaagcagctgacggaggatctggttgagacatcgcgtattacatccggaaatgtcaaactggatatgcaaaagattgacttagtggagctgatctatcagacggcaggcgagtttaatgaaaaatttgaggcgaaagagcttacaatcgtcacaaaactcccgaaaacggaagtgatgatccttgcggacggcagacagctctaccgtgtcatcgaaaacctttataataatgttgcaaaatatgcgctggaaaaaacaagagtttatgtggatgtgcatgtactggaggaaaaagtgacattttccatcaaaaatgtttcggagcgttcccttgcgttggaaaacagtaatgcgggagatctgacagagcgttttatccgtggggatgcctcaagaacgaccgagggaagcggactggggctttccattgcaaagagtctgacacagcttatgggcggcatctttttcatcggggtggacggagatctgtttaaggcttcgatcacattcccgatgtacagggaaacaatagatacggatgaataagagagtaaatttacggctgttttcagcagatagggcatgcgctttccaatgctttcggtttaacgtgtaaaagtacttgatttttgctgatgctgtctatataattttaaacaatggatctaatagaaaatgggcaaaagaatggaggaaaccatgaaattatacgatagcggtgtatatctcgtaaatggaaatgaactggtaccggacggtgcaaatgccatcgaagaggtcgtaaaaaagaccggggcagcagtgaccaaagagcaggcggcagaaaatacgattgcttacggtatcttaaaaaatcataatatatccggcaatatggacaaacttcagatcaagtttgacaagctgacatcccacgatatcacatttgtcggaatcatccagacagcaagagcatcaggattagagaagttcccgatcccatatgtgctgacgaactgtcacaacagcctgtgtgcagtcggaggtacgatcaacgaggatgatcacatgtttggtttaacctgtgcaaagaaatacggcggggtttatgtaccgcctcatcaggcggtcatccatcagtttgcacgcgagatgcttgcggcaggcggagcgatgatccttggttctgattcccacacacgttatggcgcacttggtaccatggcagtcggcgagggtggaccggagcttgtaaaacagcttttaaacaagacttatgatatcgatatgccgggtgtgatcggcgtttatctgacaggcacaccgatgaaaggtgtcggaccgcaggatattgcacttgccattattggggaagtatttgataaaggttatgtaaagaataaagtcatggagttcgtcggaccgggcgttgcaaacttaagcgttgatttccgaatcggtgtggacgttatgacgacagagacgacctgcctttcctccatctggaaaacagatgacaaagtaaaagagttttatgcgatccacggcagaccacaggattacaaagagttgaatccgggcagcgtggcatattatgacggaatgatcgagatcgacctttcaaagatcaaaccgatgatcgcaatgccattccatccgagcaacacttacacgatcgaagagttaaacgcaaacctgatggacatcttagatgactgtgagaaacgtgcagaggtaagttttgacggcgcggtcaaactggacttaaagagcaaagtaagagatggaaaactctatgtagatcagggtatcatcgcaggctgcgcaggcggtggatttgagaatatctgtgatgcagcagacatcttaaagggtgcgagcatcggaccggatgagtttacgttaagcgtatatccggcaagtacgccgatctatatggagttagtaaagaatggtgcagttgcatccctgatggagacaggtgcgatcgttaagacggcattctgcggaccgtgctttggcgctggcgatacaccggcaaacaacgcattttccatccgccactccaccagaaacttcccgaaccgtgaaggctccaaggtacagaagggacaggttgcctccgttgcgctgatggatgcacgttcgatcgcagcaacagccgcaaacaagggatttttgacagccgcaaccgatgtggatgtgaactttagcaaaccgaagtacttcttcgataaaaatatttacgcaaaccgtgtctttgacagcaagggtgtagcagatccttccgttgaaatccagtttggaccaaacatcaaagactggccggcaatgagtgcattgccggaaaatatggtattaaaagtggtatccgagatccacgatccggtcacgaccacagacgagctgatcccgtccggagagacatcctccttccgttccaacccgcttggacttgcagagtttgcactttccagaaaagatccgcagtacgtgggccgggcaaaagagatccagaaagcgcagaaagccttagaagccggaaattgcccgttagaagcagtcgaggagttaagaccggttatggatgcgatcgataaagcatttccggagacaaagtttgaggataaccattctaatggagaaattggtttcggaagtaccatctttgcagtaaaacctggcgacggttccgcgcgtgagcaggctgcttcctgccagaaagtacttggaggctgggcaaacattgcaaatgagtatgcaaccaagcgttaccgctcgaacctcatcaactggggtatgcttccgttcatcatcccggagggcgaactgccgttcaagaatcttgactacttatacatcccgaatatccgtaaagcagtcgaggacaaacagtccgagattacagcgtatgtgatcaaagatggaaaggcagaagagtttaaacttggacttggtgcgatgactgatgatgagagagagatcatcttaaagggctgtctgatcaattattacagagggtaaaaccgcagactgatattttggggcatcggcgcatgagcaccggtgtccctttttgcaaaatccagtaattaacaaaaatttcagcaaaatctgattgcgttgcctgtctgcgaaggttataatgaaaatattagataagacggaggatggcaatttggacgaacaggaaaagataaaaaaaacatcccaggaaacagaatgggaattaaaaccacagtatgtcatcatcgcactggtcgtatttgtgactttctgctgctgcatactgtttttctttatgatctaccgttacaatggattcacagacttctggaagaagctgtctttgatcttacagccgatcattatcggtgtagtgatcgcatatctgttaaatccaatcatgaaatttttagagggacacctgcttaagtttttagagccgcggatgaaaagcaaacgcaaagcgaaaaagacatcacggggaatagcaattaccggatcactggtatttttagtgggaatctgtgtgcttttagtggcggcgatcgttccatctatctctgcgagtatccagagcatgatcacatcgtttccacaggaagcaaaggatctgacgaaatgggtagacgaggtgacaaacggtgatacggaacttgcgtccatgatacagcagggcgtggacaaaataacggatacggttgagaccttttttgaagatgatattttttcaaaggtacagacttatcttacatcgatcacaagcggtgtgatctatggtgtcaaattcgttttaaatgtgatcgtcggtctgatcatttcagtctatgtgatggcagaccaggaacattttgcaggacaggcgaaaaagatcgtatatgcgatgtttaaaccggtgcgggcaaatgttatcgttgatactgtccgtaagagcaatgagattttcagtggatttatcagtggtaaaatattagattcggcgatcattggtgtgctcgcctatatcgtgcttgcaatcatgaagatgccggatacggtgttagtcgccgtgatcatcggtgtcaccaatgttataccgtttttcggcccatttatcggcgcggtgccgtcctttatcattatcgtgcttcagaatccgatacagggattatatttcctgatctttatcgttgtgttacagcagatcgacggaaatatcattggaccgaagatccttggaagttctaccggattatcggcattctgggttgtatttgcaattctggtatttggcggattatggggattcccgggtatgctgctcggtgtgccgttaatggccgtgatctattatgttgcacagaaaacggtatcatattttttgaaaaagcgtggacttacaacagatacactggcatatgtatatctgaccaaagttgacaaggagagtaatcagcctgtttatgataaaaatccgtcaaaaaaagagttgaaaaaacatcatggaaaacatatcgaggaatccatagaagagagtaaaaaagaagaataagatcaatgatagaaaagagggtatggcagactgcaaaccctctttttttgcctgtatcatggcttttttttctaagattaaattttgacatctatatgtgcgtatgataaactaagaacaaaagaagcagcaaaagaatagcgcgttctgaggtggcataatttggataaatatgaatataaattaaagctggatcagatgaaatctctgacggccgaacataattatgaaaaggcagcagagatagctgatacgattaactggaataaaataaaaaatgtaaatgcacttgtaaaagttggagagatttatgagaataccggtcgtttagaagacagccgtgaggttttgcttatggcatatgaccggtctccaattggaagaatgatcatttaccgcctggcaaaagttgccattaaaatgaaaaattttgatgaggcgaaagattattatcaggaatttgtggagatcgcaccacatgataatttgaaatatgtgttgaaatacgagatctgcaaagcccagggtgcaaatatagaaactctgatcggaattttagaggagttaaaagagcaggaatataccgaagaatgggcatttgaacttgcatgtctgtatcataaagcaggtatggcagataagtgtgtggaggcatgtgatgaactggtactgtggtttggtgacggtccatatgtagagcgtgccttagaactgaagatgatctatcagccgttaaataaacagcaggaagaaaagtatcgcagattttgtcagaaacgcgaaggtgttgttgaggtcagaccggaggaggagcttgactccggtgagatcgtgaatgaaaccgtacagataccggatgtgaagctttcaccggaacggtttaatacacagaatctgcaggaagagctgcaaaagagcatgcagcagatcatgcaggcgacggaaaaagaaactgttacagacagtatggacaacatcaaaaagcttgtggaggagattccatatctgcagcttccgaaagaagaatatgatccatctgaggaagaggaagatacgctggaacatatagagacggatcacgagatcgatgattcgttaaagatcaatttcaaagagctgcttgcagaagaacatgatggacagattgggatgtatatgccggagaaaacggcattagagcaccagatcacaggtcagatgagcattgaagaagtgcttgctgagtgggaaaagacgaaatatgccgcagaagttgcattagaagatgcaaagcagcgcagacttgaatctgcaaaggcgcgtgcgctgcaggaagcagaagaaattatgggacgtcttgcagacattattccaaagcttgatgcaggtgtcgctccaaaagatatactgcaggatcagtacatagaaggcaagccgttagaaaatgacagggcagcagctatggttgcaaacatgaatcagatcttacaggaagagattgaccggatatcgacagagacggcggatatcgataaacagctggcagaggcagccggaacagcagcgtccgcaatggaaccggagccggcagcgtcaatgggagagatatctgggccaggagtgaatgcagcggagcttgcagaagaagtatccgggatgatgcaggagacagaagatgtggaaatatccggacaggagcagataccgggatctcagccggatgaggaaatcgcagatctctccgcagaagaaacggatgaggaaactgtagatctcagtacagaggagaaggcggcagaagaagtttcagatattagtgaagagaaaacatctgaagcagatgattttgatatagttaccgcagacacgatcgatcttggcaaagtggtaacggaacaggcattagccgaagcggtagagcatattaccgatacggaaagcgcaacggatgatatcacacagaaagagctggctgacaacacggcagttgaggtaacgaaagaggttcttaagaaagaggaccgggtggaaagagtccttccggagatcacagagcctgaggatgagaccggttttgaggcagttacatcactgggtgaagaacttcgggggatatttacctattttgtttcgatcaagggaatggaagaacagatttgtcaggcacttacaggtgcggcaagacatctgataacaggaaaggatgcttctaccggaaatatggtgatccagggtggcagcggaagtggcaaaacagtccttgcaacggctatggtgaaagcacttcagaaagaaaccggaaaaccaaaaggaaaggttggaaagattgaagcttccgcactgaataaaaaggatgtagcatcactgttaaagaaaatttccgggggctgtctgatcatagagaaagccggagatatttccaaagaaacggcagtccggctggcacttcttctgaaaagtgatacaagcggattatttgtcattatggaagatacacaccgtggaattgagaaggcactcggcagagatgaaggatttgcttcccgtttctctgagaagatcaatattccgatatttaccagtgatgagcttgtttcatttgcgaaagcgtatgcaaacgaacttggctatacaatagatgagatgggtattctggcactttacaacagtatcagcaatattcagaaatatgacaaggcaacaacgcttacagaggtaaaagagattgtggacgatgcgattcataaatctgagaagggcggtttacgaaaagcatttagcattattacgtccagaagatatgatgatgaagattatgtgattcttcgcgaaaaagattttggaatctaaaatatacaggctataatcatgacataaaaataaaggggtgtaagggtatggctaatttttcagagttggatcgctatttatttggacaggcgacgcattacgagatttaccggaaactgggggctcattttacggatcaatatggaattcgtggagtatgttttgatgtgtgggctccgaatgccgcaagaatatgggtgattggttcttttaacggatgggatgaaacggcagatgaaatgacaaggttagagccggataccatgggaatattcgaattgtttattccggggatcgaggaaggtgcactgtataaatacctgatagagacgaaagatggaaaacggctctataaggcggatccatatgcaaattatgcagagcttcgtccgggaacggcatctgccgtcgcggatatagagcattttaagtggaccgatgaaaaatggatggaagagcgtgcaaagaccaaagatatctatgcaaaacctatgacgatctacgaggtacatccgggatcctggatgcgccatccgggcagagaggatgacggattttacagttatagggatcttgtgaaatatctgatcccgtatgtgaaggagatgggatatacacatattgagctgatgggtatttccgagtatccgtttgacggttcctggggatatcaggtaaccggttattatgcaccgacttcccgttatggaacgccgcaggattttgcatattttatcaatgaatgtcacaagcacaagatcagtgtgatcctagactgggtgccggcgcatttcccgaaagatgcacatggactggctgagtttgatggaacatgtctgtatgaatatgcggatccaagaaaaggagaacatccggactggggtacaaagatatttgattacggcaagaatgaagtaaagaatttcctgatcggcagtgcattgatgtggatcgagcattatcatattgacgggctgcgtgtggatgcagtggcatctatgttatatctggattatggaaagcagccgggacagtgggttccgaataaatacggtgataataagaatcttgaggcagtggagttttttaagcatgtcaatacactgatccttggaagaaacccgggagcagtcatgatcgctgaggaatctacggcatggccgaaagtcaccggccgtgtggaagatgacggactgaatttcagttataaatggaatatgggatggatgcatgatttcctggattatatgaaacttgatccgtatttccgcaaggataatcaccacaaaatgacttttgccatgagttataacgagagtgagaaatacattcttgtgctttcccatgacgaagtggtacatctgaaatgttccatgatcaataagatgccgggcgagatggaagataaatttaaaaatctgatggtcggctatgcgtttatgatgggacatcctggtaaaaaacttttgtttatgggacaggaatttgcacagcttcaggagtggagtgaggcgagagaattagactggtatctgctggaaaacccggatcataagcatatgcagaactgggtaaagaaattattacatatttatcagaaaaatccggcactctatgaacttgacagcagctggggtggatttgaatggatcaatgcaaatgatgctgagcgcagtattttcagctttatcagaaagagcaaagacggaaagaataatctgctttttgtatgcaattttacaccggtggaacgcagcgactaccgcgtaggcgtaccaaaacacaagacttataaactgattttaaacagtgacgatgcagaatttggcggaagcggcaaagagcgtccggtaaattataaatctgtgtcgaaggaatgtgatggaagaccatactcgtttgcatatccgcttccgggctttggtgtggcagtattccgctattaaaaactgtataaaatagcagaacagcgtttggaatcgtatcgaaaaacttaataaatgtgctgatgtatccgatatatacatcagctatggatggcgcagatatttcagggaagtgaaagtatgcgccattcttttgtcctgatataaccggattggtcagatataactgagtgaaaagcagaaatcaggcaaggaaaaactgtacggaaagtatgtaagaacagaaatgacaaggagagtcggatcatgagaatagataaccaacagcagcagaataagggcgtgatggatttaatgccgcagacaggcgccgtggaagaaaaaaacggaattcagatgtttgcggatgcggtaaagacagagagtagtaaaaaatctgcaggaactacgtcttttcaggcaaaagaggttacttatctgaatccggcaaaagaagagaaaaagacggtcatagatgaaatagagcagtctggttccatggatgcaggcgagcgaaaagcacagatggctgtgcttgcggaaactacttcaccagaagattatgaaagaatgcaggaggatggcttttcactggatgataccacgagcaataagatcgtgaccgtgacggataagatcaaagcacagctggcaaaggcgggggtggatatttctaaatttggagatgatcttgatctcgaacagcttgcacagatcacgggcagtccggaacttgcagttcagatcgcaaacagtctgcgggaagcggatctgccgcttgcggatgataattttaaacagatcgcagagacagtaaatatggcggattctttatccgcattggatgatggcgctgtaaaatatctgattgataatcggttagagcctacggtgcgaaatatatattttgctgagcattctgcaagtgcaggctatattccggcagaacagcaggatatttcgtccttccttccacaggtgaaaaacgtgatcgcatcagcaggactggaagtaaatgatgataccattgcaaccagtaagtggatgttagaaaatgatataccgctgacgaaggagaatcttacttatgcacaggctctgcgccagacgggactgaccacgggggcagaagatattgccgcacttgcagcagaggcggtcagcgaagggaaaagcgcacaggatgcggtgatcctgtccggctatacatggatggagcaggcgaaagacgctgtggataccgtagaaaatgccacggatgaagatcttgcttatatcgtggaaaaaggattgccacttaccctggacagtttaagggaagctgcggcaaaccggacatcgggaactgcggcatcagaaagccagacggtgggaactgtggcatcatctgaagctcagagtgaggatgcagcgcagagcattgcgaacgagagttataccccaaaagggcagcagcttctgacggcacgcagacagttagaagaaattcgtcttgcaatgacggtggaagcaaattaccgtctattaaaacagggggtttccattgacaccgagccgttggtaaaactggtggaacagctgaaagatcaggaaaatgcatattataaaaatctcttgatatctgaaggtgtggatgtgaacgacgagcaggtggaactttttagagaggtcgataaaaaagtttccgatatgcgttatgttccggcatatgtgcttggaatgaaagatgccgaggtgtcgacgatcaatggtgtccataaagccggtatggaactgaaaagttcttttgaaaaggcaagtcagcagtatgagaccctgatgacagcaccgagaactgatctgggagattccatccagaaggcattccgtaacgtggatgatattttaaacgaccttgatatggaactgacggatgaaaaccgtcgtgcggttcggattcttggatataacagtatcgagatcacccaggattctgtgtttcagatgaaagcagcagatgaagaagtgcagcgtgtctttaaaaatatgactccggcggttgtcacacagatgataaaacgcgggatcaacccactggaaatggattttacatcgttaaaccaggaggcagagaacattaagagcgaggagtctggtagggaggataaccgcagattcagtgaatatctctggaaaatggaacagaatcacgaaatcagtgaggaggagcgaagctcttatataggaatctatcgtctgatccgacaggtagaaaatacagatggtgcagcaatcggtgcactgatacagcagggatcgccccttacgatgaaaaatcttctgacagctgtgcggtctgaaaaacgcagcaataagatggattattctgtagattctgattttaatggcgtatccgggacatccaatggcagctcgattacggatcagattgaggcagcctatcagaataactgcttaaaagatgcttcggaattactgacaccggagcgtgcgaaagtgttgtttgatcaggattctgactgggagaacatgacgccggaggaatttaaagcagcgctggagctggcaaaagaacaggcagatgagagtggcattgatgcagattatgcaaaagagcagcttgcgcagttagagcaggcagcaaatgcggatgagagtatttatcgtattttggataaatatgatattccaaatacaatatcaaatgtgctggcaatggaatccatgctcaaccagcgtaatcagatgtttcgtaagatttttggaagcagtatggcagaccacaatggagacaatcaggtagatgcggatgatttagaagcaattaagcaggaattgttagaggaatttggagaagctgtttcagaaccggcagatatggcggctgcgcaggagaagttaggcgaacttgcagaaaatgtgatgaagacgatgataaacagcgatcatgtgacgagtcttgatgtgcgtgagatgaaaatgctttccgcgcagctttccgtaaacagtattcttgcaaaagaagagcagtatgctgttccagtaatggtcaatgatgaacttatgaatgtttctgttaaaatcgtgcgcggtgtggacaaaaaaggaatcgtcgatatcatgatggaaagtgaattgcgcggaaagatcgcggcgacattccaggcaaaggaagatggtatacatggactggtcgccacagattcagaggagacggcagaactctttgaagaacaggcacagaatcttatggattcgcttggcggagagaatgatgatgttacagaattacactgtgcacacataaaggaccttgatctgaatcatttctccatgggagcgtttggagtcgatgcaaagaatgaaactccgacctctgaggatcaggatacttaccgtgtgcagacctcacgtttgtatggaattgcagagcattttatcaaagcagtaaaaggaacactcgcacaggaggcataaaaattgattttcggactacatggattccgatagataattttgtataccgatatatatggcatttacgagcttattttggtagtcgtctgtcaaaagaagatctgcctctgtcggattacttagaaacccacactctacaataacggtaggtgtgggtgtttttttgagcagataatagctttcatttgcttttgcaatgcggtgattatcaggatcaacatttgcgatcaggctgtcctggatcgtatctgccagtttttttccatcctgcgactgaccaaaataaaatacctgtgcaccgcagacttccggagacggataactgttctggtgcaggctgaccgtaaagatgggggctgcctccgtgatgattttacagcggttttgcatatcttccgcttttttgttggtgtttccctcagaataaagaccgatgtccgagtcgcgtgttaggataatccggatggaatcctgcttgaatttatcccgaagtttcagtgccagtgcaagattgatgtccttttccagtgcgtcattggtgccgactttgccgggatcgataccgccgtgcccggcatcgatcacgatcgataaattaccggaaggtgagctggtctgtccggtgtccccggtaagctctgtattatgtgcggaatctgtgtccggtgtgccttttgtgtctatgtgactgttttgtacaagtatggcgctttgacttccaagaaaaaatgcggcgatcaccagacagacagccatgataagttctatcttttttttcataaaaaccccggagtatcgtttttataaaatattcacgatatccggggtttatgtcataataaaatgattgaatatttgaatgattgtatttaattgatgtatttaatgatagtgtcccagatagaaggcagctctaaaccaagtttccagaaggagccgccggcaagctggttttcctgaaggacttttaatttctcttccagggaagcagcatcctccacccatattttgtaagtgataccattgttttcgtattgtacataatattgaccgtcaatgtctgaccataccggttcggcagcatttgtactgatcagtttttgaatctctgacatgcttgttgcataggaatccagtgtaaaaagctgatagctgtcggctgagtcactggtgccagcagcttcatcggcagcctgggcatcggcagcagcattgtctgtttcatcagtgtcgttattattgttatcggatgtctgtgttgtgctgtcagcacctgtggtgtcatcaacaggtgtctcggaccatacacgggcataaaacggcatgcctaagatcagctgatctgccggaacttcttttaaggtattggcaacgccttcttttacaaagccgatcgaagctacagatcctgcttcctcagaaccggcataatgttcatcgtatgccatgacaacaacatagtctgcaaaagttgcctgttctgcgcgattatagaatgcagtaaaactactgggaacataatcgtctacggaaagaacaatgccattgtttgcacattttaatgacaactcccgtatgaactgaatataagagtcaccgacttcagaacttaatgcttcaaagtcaacattgataccgtcaaaattatattgaatagctgcggagatcaggttattgatcaggttctcacgtttggatgtataagttaaaacggatgtggtgtcgacatctttgttttccagattgcttacaagtgcccagacttcaatacctttctggtggcagtaatttacatagtcggagcttgcaagtgaggtaatgtttccgttattgtcattcaggtaaaaccatgtaggggagataacattgatccccttggtgttctgaagcacggatgcaatggttgtattggcatctgcgtttgtgatctgatgccatgccatattgatcttaaaatctttttttatatgtgtaaattcttccgcaacataatcgctggtcagcgtttttgtggatgttgcgccaagtgcttttgatttgatatatccgatgattccttctgcagtggatacttttgtccaggtatctcctgtttctaaaacagtaacttccgtgtttttgccaatatctgcgaggatcggactcttgatgccgcctttttgacggagctgtgttttttgcttcgccggcgcagtggtgtagtcaccccaggcagtcgtaagaattacacggtttggtgagtcaagtacttcataggagaaatcggagtacagttttaaaaagtcgattgcgatatatgcagtctgggcatccgccttgacaattgggtgatctaaggaatgagaatcctttgtcacataatagctggtactgtctgcatccgcagaaatcaaatctgttgcagttgtgtaaagaagtttattttcattgtgatcccagtaaaaacggtcattcagataagaacatacagtttcataatcaagatagacagttccgttaaggagttttccttttgcgtcgagaatctggttatctaagatcagggctacgtcctgttcgccggacagattataataatcagataaattcatatgttctttggaaggtgtatatttttctatgatgcttccgagaagcataaaacagataatgacgacgatcagagcgccggcagccaaaatagggacaaattttttcttcatgttaagaaccctcttcttcttaagaattatcgtttgtgttcctattgtagcataatgatatgtaaattcaaagttatttactcttattttacggcagagcttatgttcggtaaaactctgccgtttctttttgtcggatttgtatatcgtcttagatattttttcttattctgaccgggtgggcattgaggtactccatccctgtcaactgttatgataccggatctgtctgcaaaatgtacagaccgttatcaaaggttcgtttttttgatcttatcaaaatgtaattctgttaacaccccctcgttgaatatataatctctcatgtaagaattttcttctgtgacggaaagctcttctgtgacctcttttgaattgcttggcacaccttcgaaccagatggttgtccccatatgttctaaggaagagagctctaaataaagctttttcatatgtttagaatccaatgtagttatcccccgttattacttactgtatgacaaagcggatcaaagtcctttgttcccaaaaggaaattcgctggttacaattatgtgatatattaaaaaaatgttttgtgcagaaacttttcagcagataaattcctgcagaatggaaaagtgttctttctttatataaaatggatccggaatggatggaacactgcttatggaaatctgataaagacgggaaaaatcacgaatctgttttggactttccgttcgtgttagacagtaaaaaccttccccaaggtttgtatagtgactgatcgattctaataattcccgatattgcctgatattccatggtgcgagacttccgatgacaagttttctgtcacagcgcagaaattcattgatacagcactcattaaaacttccaaaatcaaggagcaggatatggtatccctgattatatagctccggcagttcgtccggtgttatgtccggatagtaatctactccatgaatgtcaaaaacagtccggtcacccataaacccgcatctgcatgggagcgtggtttcagagggaatcgttgaaaggttttttctcttatgcagctctaacagtgcagtttttttatgcagtttggaatggcacaggtttgaaagtgtaattgcaaggtgtgttacaccggcaccggctgtgcagcctaaaatacctatggtaagtctcttatttaagtcagtttttccgatgttccggatgatgtatcagctcctttcgttgtagaatttgcataataagacgttccttctctggagtcacataaaaaggattggtgtcttcaggaaaacaatagaccggatttttcagatatctggcatatttttttgcagcatttttattgccatggttgcagatatatatgtaagatccagtattttcaagccggctgataaaagacagtgtatctgcaaaatcccatggactgccgcttaacaggataaatgtcaggtcgaaatgaccaaagtcagaatattcgctggtgtgagtgccaaaatcccttacccggatgacagatggtaaaacaggatcttcaattccgggaccataacagggagtggcggtaaaattttttgactgaaagattccctcgtgttctgtgagcgaaatccctgtctgggtcatggatataaggttgtcagaatgatccattggtatataacagcagggaatatgtctgtgattcagtgtgtttaccagggatactgaaaaaaatgttgcaccggcaccggaacggctgccgatcacggctatgttttttatgagatgtgcaaatgagtgacacgcagaatatctctttttggatgactgtcggaagataagaccttttttgaccggattttttcccccggcaagttctgacagtgcaagcataagatctgtggctgtctggtatctggaatccggattccggtcggccgctttttctataatatgcgtgagtgtttcagaacagtcaggtgtgcatgctctggcgagtgcttctaacactttcccaagagaatagatatcggaagctgtagttacggtatctccgttaagagcttccggcgctgcatatccttctgttccgtataactggaaatttttaccgaaaacggtaataaatgaagcaattccaaagtcgattatttttacctgatttccacataatataatatgctccggttttaaatcctgatacaggatagggtatggagataaatgatgcagataatcaagaacggcgcaaatctgcatgccgtaatttatgaattgttcctctggaattatttcctgatggagaataagatcctccagtgaatcaccctgaataaattcttctatcatataaaaaaaatgatcgtcttcgtcgatatcatatatgagggggatgccaggatgattaagattcttcagaaggccggcttcctttaaaagctgttcttctgaaaagttggaagtgtttcgtgccgtgtctttggggatacacttaatagcacgataaactttcagtttgagatgttcggcaagatagacagtgccgctgctgccggcaccaagagtcgaaataatacggtatttgccaaacaataatttggtatctatgcgatatccgctcctttctgggcgtgtcatattcgcatctcatgcatagtttatatcatgaattattttacattgcaacttcttttgtaatgtttgtgtaatatatacaaagattaatgcttataatacagcatatgttacagaaaaaaagcagttatggttttagaaagttttaataatggtatactttacatcgatattgcatttgtttataatagatgtacagtttacaaggttttccggataaaaggaagtgattgtatgaaaattgaaaaagtaaatgataatcagattcgctgcacactgacgagagaagatttagcagaacgtcagatcaagttaagtgagttggcatatggcacggaaaaagcgaagatgctgttccgtgacatgatgcagcaggcagcatacgagtttgggtttgaggcagatgatattccgctgatgatagaggcgattccgctttcggcagataccattatattagtcattacaaaagtagagtatccggaggagcttgatacgagattttccaagttttctgatccggatcctgaggatttatatgacgatgctattgttggtggaaatgctccgatttccgagggggcagatgatatacttggattattcaaaaaacaacaggaattgagaaatgcagcaaaaacgcagcagaatagcaatttcgtaccgtcagatggcggtcagaaagaaaaagaagatccggtcaaggtccttgtagacattacgaaattgtttatgttccagaatctcactgaactgtcaaaactcgcggctgtgttaggcggtttttacaaaggtaaaaatgacctgtatgaggatgttgcaacacacagatattatcttctggtaagtaagagcagccagtcaccggaggagtttaataaggtgtgcaatattttatctgagtatggagcccagcaggcatattcacctgcgacggaggctttttttggcgaacattacagactggtgataaaaggaaaagcgctgcagatgcttgccgcattataactgacggacgatgattttatgaacgatagatcagtttgatatcagaaaaggatcgtgaagatgagcaaaatcattttcacgatccttttctgatgtaatcatttttacctgtaagatggtattccaaacttactatgcaaggtcttttgcaagaaaatcattgatctcttttacaagagcatccggctcaattccatgaaccatagcggcctcttcgatggtctccatctgggaagatgggcatccaagacaatgcataccgatatttaaaagaattggcgcgatgttttcgtcaatctgaagcagttcgccgatcatagtagattttgttacctgtgtcatatagtcctccttataaaaaaataggtgtttttagtttttatcacagcttattatgcctggatgtggtcattataatacgaatcgacagggattgcaatcagttccaacggaagtacgaaaaaataaacatggagaatccgtgaaaaaatttataatttttcaaacaactgactctttagagaaagtgtgttgaaaccgatatatacagcagagaattgggacatggagtgtcggaaatacagcatggatgcgtggcggagacaatagaaggagaagagaatgagaataaattacaatgtgtcagcagcgattgcgaataaacatttacttggaattgaggataatttaagtgcatcgatggaacggctttcatcgggacttaagatcaaccattccaaggacaatccggcaggaatggctatttccaacaagatgaaagcacagattgatggtttaaaccgggcttcccagaatgcatcggatggtatttctgttattcagatcgcagatggtgcgctgagtgaaacgaccagtattttacagcgtatgagagaactttccgtgcaggcagcgagtgatgcaacaatgacaccggcggataaagaagcaatccagaaagaaatcacttcattaaaagatgagattgaccgtatttcaacggatacagagtataacagcaaaacacttttagatggttcattagataccagggtttacaccaaaaatgcaacaagagtggacatttctgatcatgtgaaagcaggacagtatcagctttccattgatacagcagctacacaggccggacctgtgactgcaaatcggaattataattctacagcaccgatcggcgtatccggaacgatgagtattaatggatctaaagtagagatagaggcaaccgatacttatgcagaggcttttgggaagatcagaaatgcagcagagactggtgaaacaaccgttaagattgaaacgaatggagcactttcatttaccgcagaacagtacggaatgtcaagcatcttagagatcgcatttgatgataagcagcttgctaatgcacttggatttacagcagccggaggaaacagtgttgtagaagatccagagaataaaggcagctatgtatacggacagattcagaatggcaaagtgatcgtaccttccggtacggatgccgaagtaacgctcacaaaaccgggtgatggaaccgggtttggtgatacagctacggtaaaaacggatggaaataagattacggttacagacagagccggatttgagatgtcatttcttgctgatgcaggttatacgggtgatttggattttgatgttacagatattggaacaatggcacttcatatcggtgcaaacgaggatcaggagacaaaagtgcgcattccggaagtatcctgcaagagtctgtatattgatgatgtagatgtaacaactgtaaatggtgccggcagaggtattacaaagtttgacgatgcaatctcgaaagtcagtgaagtgcgctcaagacttggtgcataccagaatcgtcttgagagtacggtatcaagcctggatacgtttgaagaaaatatgacaggagcccagtcacgactgacagatgcggatatggcatcggaaatgacagattatacacatcagaatgtattaaatcaggcagcaatctctgttttgacacaggcaaacgatctgccacagcaggtattgcagattctgcagtaacaggagggatctgttttgaaaaaagaacagataatggattttacaagaaggatcagtcagagtaacaggggtggtctggtcattgtgatttatgacatattttttgcgtatatggaagatacaaaagaggcacatgataacggagaatgggaaaattataagacagcattgcggaatgcctcaaaaactatcagtgaattgatctcatcgcttgatttttcctatgaacttgcaggagagttatatcgcatctatgtattttgcagggagacacttgcaaaagcaatgtataaaagggatttaaaagaggttgaacttgcggagaacctgatgaagaaactttacacggcgtttgcggaggtaatgaaagaggatacctccgcaccgcttatgcgtaatacccagcagatttatgccggatatacgtatggaaaaaatgatttggttgagacgtatcaggattttgatacttccagaggattcttagtataggaatcctctattttttttatactagcgagtaaaaatttatagcgcatttgcacagaatatagttcataaatgcagcaatcaatcatgtccgggtcaattacattttctaaattacggtatgcatcctgtagatcctgcgcagtctgatggaggtcattcattagcactgtgtaatgcgcatcatttgttttttctggttgaaaaaaacgaaacataatattcctccgtctgaaaaattctttatttttagtataatcacgaaaattccattctatacaaaaaacggaaaaattgtaagaaattatttgcataaaatatgtccggatgaataaatttgataaaaagaagagaaaaggatatctatatgcagcaaatacagggagaatgggcaatcataggagttcttggtatggtcctttttattgttgtaatcgggaaaaaaatacagatgctgttaaattttatgattcgtattgttttaggtggaatcgggattatttatgcaaatgatttttttacttcacagggaatatcgattagcgtgggattaaatccggtaagccttttgacaattggaatccttggtataggcgggtttgcgctgctttatggaattttggcatgtaaatttttgtgaatagtctacaaagataggctgttttgtaaaaaagtatggacaaacaaaaaaagcattgctataattcgacttacaaactacgaaagaggtgatgaattggggaactaatgaatcttacattgctgacgcatcttacgttagcggtggtgatggattttggaaacggcaggatcagtaaccggctgattgtttccggattaatttggggacttgcatttcgactgctgggggaaggaagtgcaggtgcagttcattttctgatgaatatatctattccggttatcttattatttcttttatttagtctgtgcatactgggtgcaggcgatatcaagttattttccattgcaggaggttttctgacactgacacagctttgctatctgatacctgtggcgtttgttgtgggggcagtgataggagcaggaaagatcgtttacaaaaaagtaacggttggttatgcaattgggacaaagacattcatgcatttttcaacagcaattttaattggatattttatcgtggtctgggggtggggtattgcataaactggatgtggcattctgcgatacgaatgaaacgtacggggaaagatttgctgcatatctgatggaacataaggcaaaggaatttacggttcatttatttccggagccggaattatttttacagaaaataaagaatgaaaaatttgatctggttttgctggggagtggattttcagaatttggcgaacaggcagttttgtcgggaatgaccgtgctgatcctgtcagaaaatataccggagcgtctgtcagaagataattcttatctgcagtcggggagaaagctgacggtcatttttaaatatcagccaatggaggcgatccttcatgaaatgatggtagtgacaggagggaaaaaagcgggaaaggaatcatttacagacagattaaccaagctggagataataggggtatattctccaatcggtcatgaaatgcagatgccgttttctatggtactgtcttctgtactggcaaaacaacgacggatattgtatatcaatctgatgcaaaataccggatttttacagttgtttgacagtcaggcagaatacgatatcggggatctgacccttcgattgagaaggggaacaacagaatcagaacagttttttcagagcatatatgaaatgggagatttttcgtatgtagcaccatttcgcaatcctgagcagctgggggagtttcagatggatgattaccggaaactgctggcacatctggaagaaaatacaaagtttgatacggttgtatttgattttggaactgggattccatccatagcggcgtttctggaagaatgcagcagtatttattgtccggtaaaagaaggatatttctatgaatgccagaaagcggaatttgttcattatctggaacaggtaaagccggacggaatgtccgaacggttacagtttgtaaatcttccgtttaccgcaaaaggaatccgtggtgggggaaatatgttagaacagcttgtctggagtgaatttggagattatataagagactatctggcaggggatgcttatggagaaatataggtggagtgaagaaatatttgatgatttaagatcaaatatcatagcagcacttgacttgtccagagaacaaaatgatgaagaagtttgccggtttattgaaaaggaagtggaagaatactccagaaaaaatctgttaactctgaaagaacgggaacaattagaacatttattgtttaattctttaagaaagtatgatgcgattcaggaattattagaggatcctgaagtgacggagattatgatcaatggagcgtcccgtattttttatgagaaaaaaggaaaattatttcgggcgcagacacatttttcatctgagcagaaattgggtgatgtgatacagcagatggcaggaaacagtaaccgtatggtaaatgaggcatctccaatcgtggatacaagattagcagatggatcgcgtgtaaatattgtgctttcaccaatttccatagacggtgctgcagtatctatccgaaaatttccacaaacacctattttaatggaagatctgatacggatagagtcaattacagaggaagccgcagcatttttaaaagtgcttgtgatggcaggatataacatatttatatcaggagggacaggctccggaaaaacaacgttcttaaatgcgctgtcccagtatattccgagggaggaaaggatcattacgattgaagattcggcagaactccggcttgtcgacaaaccaaatctggtaagacttgaaacaagaaatcagatgtttgaaggagtaaaaccgattacgatacgggatctgatccgtacggcacttcgaatgcggccggagagaattgtggttggtgagtgtcgtggagaggaagcgcttgatatgctgcaggcgatgaataccggacatgatggaagtttatctaccgggcatgcaaattcctgtcgggatatgatgagtcgtttagaaacgatggtgctgatgggaatggagctgccgcttactgcgatacgaagtcagattgcatccggactggatattctggttcatcttgggagaatgagggataaaagccgtaaggtcctgacaattacagaagtgactggtatgcaggaaggggagattgtgttgaaagatctgtatcgttatgtggaaaaaccatcggacggagaagcagtctgtggagaattacagcgggtaggtacactttttaatcaggaaaaatgtaaaagagcaggaatcacacttcctggtacaggagaataaatggattatcgtaaatatcggtgtaatctgtgggaacgactggggtgtctggcagcagggacggcagtcgcagcagcgatcgcgtggctgttttaccgttcatggtatggaatggtgctggttattcctgtaaattatctaatcgtttcttattacaaaaataaaaaaagagatgaacgtgcaaaaaagctgatgattgaatttcgggatgcgatccaggccgttgcagcggcattgcttgcaggatattccattgaacatgcatggaaagaagcggagcgggaaattatggatctgtatggaaaagaggcaatgatcactaaggaattgattcagatgaatgcagaaataaaattaaaccggaatgtagaagagattctgcatgatctggcagtgcggagcggtgtggaagaaatccaaagttttgcagagatttttggttttgcaaaaaggagtgggggagacttccctcagattatccggacaacagcagcacgcatatccgcaaagatagaagtagagagggaagtggatacagtcattgccggaaagaagctggagggaaagattatgagtgtgatgccattttttattctcgcctatctgaatcttgcatcaagagaatttatcgatccgttgtatggcaatctggcaggtgttcttgtcatgagtgcagcattattggtttttgtgggggcaatggcaataaacagacgaatttcagatatcagggtgtaaggggagaaacggatgattttgtgtattggagttttgtgcgtggcagttttggtgccggttgtgggaagaaaaaaagtatcatcagaagtaagacgtgcggcagttgttatgattttagtatcggctcttgcaattttagcacaaatttcagaagaaatggaaagcggtggaatagaattagaacttgtgcgcccatcatatggggaaggggattatgaggaagaaatgacggtcgatgcagaaggtattttagatgggtattcctatcaggtggtggttccggaacgtattttgtcgaaacaggaggaacaaaaattacttgaggctgcacagcaggaaattgatgatgaatttgtgaaaaacaattgggaagtgcaggaaaaggcagagataagaaaaaattaccaggagggagcggtaagcgcagactgggaatttgaaccgtatgatgtagtggacgatgaagggagagtggttgaggaaaatatacccgaaaatgggattctggtaaaagctgcagtaacgttaagatgcgaatcatcagagtgcatcagtgaacggtattttcgtgtaatgccaaaggagcttgatgaagaacacaaaatgatccgtgaaatagagaattatttaaagaagcagtcagcagatccgggggatagcatcaaacttccggagcagctaaacggaaaaaaactgatctggaataccaaaaaagaacatttatctgaaaaaattctgttccttggagggggaatagtaatcatccttccttttgtggagcaatcgcgtaaaaaagaaagagaaaagaagcgcaaagcgttgttggaactgcagtatgcggatatggtaagtaatctggtacttttacttggcgcaggaatgactgtttctaaagcatggaacagattgacagaaaattatatgaatgagcggcaaaaaaggacaatttgcagaaaagaagtctatgaagagatgcagcggacttcatttgaaataaaaaatggaatgggggaagaacgtgcttatgagcgttttggagaaagatgtggcggctaccgctaccgcaaatttggcaatcttttggcgcagaatctgagaaaaggaagcaggggtctgacaaggctgttagagcaggaggcggaagatgcctttgaagaacgaaaaagtatggcgcgaaagctgggggaggaagccgggacaaagatgttgtttccgatgattctgatgctcggtgcggtgatgttaatactggcatttccagctatgcgttccatggaattataatttataacaaaaaggatttgccggtaaagtgtgtaatgatcatttcatgaaattatggattgtaagattagaaaggagaaattgtatgaaggggtttaaagaatttttaggggaagaagacggggtggccattattgagatcgtgttgatacttgttattttaattgggcttatcgttgtatttaacacgaaaatcaagagcttaaatacaaaaattcttaagaagataacaatagagagtaacaaattgttatgaagacagaggaagaaggaagtctgaccatattttctgccctgagtctgttgttgattttatcttttctgcttgcattactggaaggagcaagggtatcgggattgcaaatgatggatacccttgcggcagatacaggaatggactgtgtggcagcggaatatcagacggtattatgggataaatatcatttactgtatttggatggtgcatatggttgggatcagtttgatgagaataaagtgagctctcgtgtcatggactatgtggctggaaatttgtctgaaaccggggaaaacagtgtgtttcgaacaaagctgtgcgaagcttccctgctggaatatatgtttgcaacggataatgatggtacaggtatgctgcgtcaggcatctgcatatatgaagaggcatctgccggaggatgttgcaaagaaaatgtatcagcaatatcaggatggaaaaaaggcggaggcagatggaaaaacagaatatagtgtagaggatgcagatcaggccatcataaatgcaaaaaaggaaaaagaacaggcggatcagaatgacaaagagggtgcgccgcaggaggaggctggagaaaaaaacatccaggacaatgagaataatcacgcacaggatgcagaagacggcaaaaaggaaagcccaatccagattgtcctgcaattaaaacagaatgcgctccttggaatgacggtatcagatatgtcgtctttatcggcgaaagcagttgaagcaaaagatatggtttcgaacagacagtgtgaaactgggcggtatgatatgaaaaaggcagaaaaaatgaatgtatctgatcgtgtcatggtactggaatatattggaaaacatttttcggattatacagagccgggaaaaggagatctaacttatgagatggaatatatcctgtgtggtaaagatacggataagaaaaacctggaatcatccatagaacgtctgatgcggatgcgcgaagctgcaaatgttgcacatattatagcggatagagaaaaattaaatcagacattaatgattgcaacatcacttgccggtttttccgggaatccggcagttgtcaagattgttcaaattggtgtggtggcagcgtgggcatatgtggaaagtatacttgatctgcgaacccttctttccggtggaaaaatttcactcattaaaagtgcagcagagtggaccacggatctaaaaaagctgggtgaaatagtgacgggtgagggaaaagcaagagaatgtaaaaacggcttatcctatcaggcgtatataaaacagctgctatttgcaatgaaagagaaaaaaatggcatatcgtatgatggatatcatggaacttgccatgcaaaaggagcagaatggtaaaaatgccagaatggatcatatgatagacaatatgatctgcgaactgcggtttgaagctaagccgttatttgcaaagagaagcttatatggagatatggaaatggggggatatacgttttttaaaagacagaaactgtcatacataaatgaataaggaggggatatggcggtgtttcttacagagaagggaaaaaagaaatataaaatatacaaaaaaggatctctcccggaaagtaataatattctttctcatcaggcggaggcctgccgccgtcaggagacaccgccatgtctctggctggaaggatcatttacattagaggcggctgttatcttgccggttatggcattattttttgtaatgattctaatgtttttccgggtaatgcaggttcagatggatgtacaaaaggcattggatgataccgggcgtaaacttgcagttatggcagcgcaggagggtgaagatcatgagaagatcgttgggatggctgcagcaaatgtacttttcaagaaaaatataaagaaaagtgacaatatcaaccactatgtagttaataaagtggcaggtattaatcttttgaaatcaaaattcacggaggataaaatttatcttgtagcatcttatggtgtcaaaatgccggtgtggctgcccggaaagccgtatcttaaaatcagacagcatgtcatttgccgtaagtggacaggatgggtggaagataacggtaatatggagatatgggtgtatgtggcagaaaaggggagtgtatatcatacatcgagagaatgtacatatttgaaattatcaatatcagctgttaattatacagatataaagaataaaagaaataaatatggagaaaaataccgcgaatgcgaagtctgcgcggaaaaaataaaaggaaaaaatacggtgtttattacagatcagggaaacagatttcattatgatttaaattgtggtggaattaaacgcacaatttatatgatacgtctgtcagaagtgggaaatagaaaaaaatgcagtagatgcgaaacttagaagaatgcaggaggattatgggaaaatgctgcaaaatacattaatacttggatttttttcgatatctgcatttcaggattacagaaatagaaaaataaatatatattttttactgaccggaggtattataggactcttatttcatctctatagtatggagttgagtatcatagagattttactcggaatggggattggaatgatgatcttgttttttgggttatggtcaggtggaagtgtcgggcgtgcagatggaatgattctggtggtcagcgggatatttttgggatttgaaaaaaatgtggaggtatttgttatgggactatttttagctgggataacatctttatttttatcggtgatcagaaggaaaggacgaacctacaggattccctttgccccttttttactggcgggttatctgttcgtaatggtgatggaatgaaggaatgggaagcatccattaccattgaggccgcaatcattatgtcaatggcgatgttattatttttcgttattatgaaacttggactgcagttgtatgacgagacgagaacacttgcagggggaattataaaagatcaaacagtaaatgcggtaaaactgttttatgagctggaaagggtgagagaattattttgagtattcaatttagttattacagaaatattcatgccagtcatatgattttaacaccggcattagaaggagaaccatgggaaaaagaaatgctctggagaaacagacccagggaacttatattgccggagtataatagcagaaacggacagacacagttgtggtatgacataacaggaaaacaggcagtggatatgttagcggaattgtcagatatcagttatgagatatttattaaaatatgtgaggcggttgttgcgatggcggaggtactggatggcttgctgatatctccggatatattgctgctgcgcccggaaagtattttttttgacaatcagacagaaaatgtcagtttttgctgttattttggaaatgaaaaggagataggaaaatcatttcatgagctattagagtatcttctggcaaaattagaccataaaaatgtgaatggagttcagacggcatatgagttatttgaatataccagaatggatggatactgtattgcagaaataaaaaagatactgagaaaggctgaatatacagaggatgtaccagaaaaaattacagagacggtgtggaaggaagaagagtctgagtatatgtcgattcctgtggaaaataagaaaaaagggatcctgcgtttgtggcagcaaaaagagcagaacatatttggaaggatccgtaaattattacaagggggaaaaataccggagaaaaaagtggagccatttgtatttgaaccggaaccagaaattaacatgcaccagcagaatccaactgttttacttgctgatctacccaaaaaggaatatggaatactaaaatatgaaggaaatggcacctgcagtgaactttcgatagatcataccccatatattataggaagtgaattggattgtgatggtgtgataccgagtggaacagtgagcaggcatcatgcgcggatcaccagaaaaggggaggtttactttatagaggatcttaattcttccaatgggaccatggtaggcggagagttactgaattgcagggtaaaaatgagccttcaggcgcaggaaacggttatgtttgcggacgaaaagtttagatttatttaagaaaataaaaagacatacatatttgcaatctttttttgctacgttataatgaactttagcgagttcatattatgtgtggaaaacatgcacaataaatacggctataattaaatcagagggcaaatatatgaacagggagatagaacaggcaatacttacagaaggttaccggttttgcagggtacagccggaaaatatcggcgttttttataaatactaccagcagggatttcatgtggtaatgatgatatcgctggaagatacacaggctttgacagtagaacagcatcaggtaatgcaggaacgtgtgatggatctgttttatcatccacagggaagacttgcagattttccggaaggctatccggtttatcatgtggaattgcttacactgctgtctggtaataatacggatatgatgcatcagttatgctgtatgcaaaaaaatgtctggggttacgacatgaagcagggcagactgatcatttatgagaatcagccgggggatttctggggacttaaaaatgcactggagaattgcagagccgaatcaaaaagtaccggaagtacaaatccaggttttcctctgaagggactctcctatactacgatagcgattgctgccataaatgtgatcgtatatctgatactggaaattctgggagatacgcaggatccgttttatattgcatcccatggcggaatgtacccggagttcatacagatcaatcatcagtggtggaggatatttacagcgatgtttattcattttggtttaccacacctggtaaacaatatggtaatattctgctgtgttggatcgagactggagcgggcagcaggtcattttaaaatgtttgtaatatacatgttatccggaattggtggaggattattatcctattttatgatgttatacagcggagattatgcagtatcagcaggcgcatccggtgcggtgtttggcacgattggcggtttgatctgggtagtgataagacatcggggcagatttaaaggtttaacggtaaaaggaatgatccttatggcggtattgagtctgtactatggtttttccacaattggaattgataactggtgtcatgttggaggaattcttaccggatttcttgcggcgatgattttataccacaaaaaagtggaaaattgttgattataagaataaaactttatatactgaaaacagtatttggtgaacatgcaggaagaggtagaatatgaaagtaaacatttattatggtggacggggattgttagatgatcctacattatatgtgttgaacaaaatggaagaagtattgcaggaacttcgcgtgactgtggaacgcattaatatttatgagcataaaaatgagatcgcaacgcttccgcaaacgatgaaagatgcggatggtattattcttgcgaccaccatcgagtggcttgggataggcggctacatgcagcagttcctggatgcctgctggctgtatggcgataaggaaaagataaaaacgacttatatgcagccgattgtcatgtctacaacatatggagagcgcgagggcgaactgacattgcagagtgcatgggagattttaggtggacagccatgcccgggactttgcggatatgttgaggatcttgtcagttttgagatgaataaggactataccgttctgattgagaagaaagcagaaaatctttaccggacgatctcgcagaaagtaaaatgtcttccaaccagcaatcaggcagtaaaacagaccatattaaggactcctcagttagagcttaccccacaggagagtgagcagttgtcaaagtatgtgtcggatgacacatatgtgaaaaaacagaaggaagatatcgaagaacttgcaacgatgtttaagggaatgcttggtaagtccgaaaaagaggatgaagaggcttatattgaaacatttcgtgcacagtttgcaccgcagccagaatttagggcaagatatctgtttattatagagggcaggaaaaaaccgctgtttctggaagtaaatgaaggcgagcttaccattcactatggccaggaagaaaatattgatgtctatgcaaaattaaaaccggaagttatggacagtatcgtagatggacggatgacatttcagagagcatttatgacaggggaaatgactgcgaaaggaaactttaagatcctgcgtatgttagataccatgtttaatttcgcacattgatgcacaaaatctgcaggacgtcgcagcaaatacgttgattacgcaaataaaaggaagtgcagatgcacggaaatggaggataatagataaaatgagagatgcaaattgtattttttgtaaaattattggaggcgagattccgtccaatacgatttatgaagatgatgagttcaaagtaattctggatgcaagcccggcatcaaaaggacatgcattgatcctgccaaaggaacattatgcagacatttatgagattgatgaaaagactgcaggacatgcaatgcagcttgcaaaaaaacttgcaaaacatatgacggatgttttaaagtgcgatggatttaatattgtgcagaataatcatgaaattgctggacagacagtatttcattttcacatgcatctgatccctcgttataagaatgcaaaaaataatgatattctgatctgggatcatgaagagtttacaccagaagagatggcggagatcagagattctttaaagatgtaaaaagattgctgaataatcatttttttgaccatagttatacaacgaaagaggaacagacatataaaaaatatatatccgttcctcttatcttaaaaatcattttttagatgcgtctaaaatcagtccgataatcgtatcaatggaattacggctgttactgttttccattgcctcaatatatgcttcctttttgtggaagacatgttcaattgcttcaagaagtgttgtgtttgacagttcttcttcctctaacacataactaaatccctgggaacgaaacgaatttgcattcagaatctgatctccacggctggcagcggcggaaagaggaattaaaatattaggcttgcgcaacgcaagaagttcacagattgcgtttgcacctgcgcgggaaatgacaagatctgcaagagcaaacatatcggaaagctctttgttggcatattcaaactgtgcatatccatctgtcgcagttaatgtatcgtccagattaccttttccacagagatgaatcacattataatttttcaaaagttcaggaagcagaccgcggatcgctgtatttattacacgggagccggaacttccaccaacgatcagaattgtctgtttactgtgatctttaaaatgacagagcgaaaaagcaaagtcggcatttcctgttaaaagttcctgacgaatcggggaaccagtcagtactgccttttctttcggaagataagaaagtgtttcaggaaaattacagcaaacttttgttgcgctcggaatggcaagtttgtttgcaagtcccggagtcagatcagactcatgtataatggcaggaactttacagtgttttgcagctaaaacaactggaacagagacaaagccgcctttagaaaaaacgacatccggttttatcttttttaaaagccggatcgactgcgcatatccttttaatactttaaatggatctgaaaaattcttaggatcaaagtaacgtcttaattttccagaagaaatgccatagtaaggaacaccctgttcctcgatcagccgtttttcaattccttcataggaacctatataagaaatttcaaaaccttcatttcgcaaggctggcatcaatgcgatatttggtgtgacatgtcctgcagtgccgcccccggtcattacgatttttttcatagaataatccctttcctgtaacattttgcacttccctatttataatacccttatgcataaaagtcaagaaaagacttataaaatggaaaacaggaagagagagaattgataaaaagcaaagaattgaaagggaaaaatgtcggaagttgcggtcaaaacacggccgaaagaccttttcaaatggttctgttctttctataattaataagaaaaagggacaatacataaatttattgataagtcccggaaaagagaggtggtatacatggagcagatgggaacctttatggcagaatatgcagaatggttttatatgggaagcagtattgtgatattgatccttctgatttatgtattacacaggataaagaaaacagagcgaaaaaaccttatgatgaacagggaaatagaaaaaagattgcagcaaatagaaaaacgaaacagacaaaaagaaaccgaagatagaacagaaaacgaacatgaaaaaatgaccggtaaaataaggctgaaggaagacactgatttacaccagacgcaggtattgcaaggtctggagaaaggaaagcagaatgcagagtccgtgaccgtgatccatgatgttatagaggaggttttttcgtaaaat

SEQ ID NO: 5249 - DNA, 1614 bp, Unknown
  gut microbiota DNA sequence
aaggtgtaatactatttacataagatggtaaacactgatggaggttttctatgaatttaagaaaaagagcaatcagcggaatcatgcttgccggttctatggtagtgatgtgcgcgattgcagatgcagccagtacagtttcagcagaggcagtagcggttgtagcagacacaaggacggacttagctacagatgggacagcaggtgttgttgcacagttaaaccagataaacacagatatagtggagatggcagcagcagggattgaacactcccagaccatacttgttgcttcagcagatgaggaagcgcaggcagtggaagatacagatacattggaaaatgcatctgtagtacagaatgaagcagcatccatagaggaatctgcacagattgaatcagaggaagatggcacggcacaggatgcgggtactacagaagatatacaggaaacagttgaagaaaacgcaacagatatagaaaatacagaaaacactgagaccgagaatacagaagagacagaaaacatcgagaatgctgaggatgccgggaatacagagaatacagaagatgctgagtggcagaaccgtctgatggcagatgttgatgagtttttatatgtcagggcatctggcggtgcggatgcagagattatcggtaaattatataaaggtgatgtggcagacgttgtcgagagcggagatacatggactcatgtggtatccggtgatgtagacggatatgtcaacaatgattattgtgtatccggtgaggacgcacttgcctatgcacaggaaaatgttgaaacagaggcacaggtcaatacgaatggacttcgtgtcagaaatgaagcgtccgaggatgcgtccgttatcactgcagtttccgaaggaacgacattgacggtcgatacagatgctgaggcagaagatggctgggtagctgtaaaatataaaggacagaccgcatatgtcagtgcagattatgttacgacagaacttgcacttggcgaggcagttacaatcgaagaagaaaaggcagcattagcaaagaaagctgaggaagaggcagcggcaaaagcagcacagactacagagacatccaccgtacagaatgcttcagtttcagcatcttatgatgatgtgacacttcttgcagcactgatccagtgtgaagcaggaaatgaatgttatgaaggacagcttgcagttggggcagttgttatgaacagacttcgttccggtgcatatccatccagtatttctggtgttatttaccagagcggtcaattcccgccggcaggacagggaatggttgcgagtatcgcagcaaacggaccaaagagcagctgcgtacaggcagcacaacaggcattgggcggttctgataacactggtggtgcaacctgtttctcaagagcaagttccggacgcgccggtgttgtaattggaaaccatgtattttattaaaaacggcataatatgattttagacaggtatttcggaaacggaatacctgtttttggtttgcgcgccatgggcgcgctctaatgggtgaaagtcccgaacacgcctaggcaacgaggaagtgtatagcagaacagcaagggtgtcc

SEQ ID NO: 5250 - DNA, 2000 bp, Unknown
  gut microbiota DNA sequence
aacgaaatcaccatgacggtatccaactacacggtttgtctttccttcgcagagtaagtctactgctaaggcacccatggtagacgcatatacacggtctttacatgtcgggcttccaccacgctgcatgtgacctaagatagttgcacgtgtctcgataccggttgcagcttcgattctctttgccatactggaagaatgtccgattccctcagcatttacgatgatatgatgctgtttaccgcgtttacggttctcgatgatgtggttgactaatttctgctcgtcatagtcatatttttccggaagtaaaatatcctcagcaccgtttgcaataccgcaccataatgcgatataaccagcgccacgtcccataacctcgatgatactgcaacgctcatgggaggttgatgtatcacgaactttgtcgattgcttccattgctgtatttactgctgtatcaaatccaatcgtgtactcggtacatgcaatatcaaggtcgatggttcccggaagaccaatggtattgattccaagtcccgcaagcttctgagctcccttgaaagaaccgtcaccaccgataacaatgattccgtcgatgccatgtttcttacagatctctgcaccacgctgctgtccttctgctgttgtaaactccatacagcgtgctgtctgtaagatcgtaccaccgcgctggatgatatcggaaacatcttttgcttccatatcaatgatctcttcctgaagaagtcctgcgtaacctcgcttaattccttttaccttttttccctttgcaattgcttcccttacaactgcacgaatggctgcgttcattcccggcgcatcgccaccacttgtcagcacaccgattgtattaatctcttttgccatttatcgttccctcctaaaataatatacccatttttctaatctttattattctaatctctttattatttcttttcaatgctcttttcaacaatttttacatttttttcgcccaaaaattccgtcaagttaccgacaagctccggattgatatgaatattgtaattttggcctaatcttttcatggcacgcggcgaggcaatatagatcacaatctcatcatttccgtccgaaccatagagccgggaatacagttctttttccttttcctcatatgattcttttgtcgcaaactgaagccacagctcccgtttggtgtcgtcaaaggaatagattttttcacagatcagttttccgtttttatcttcctcgacattggcatgtccggcgacaaagactttttcatcctcgttcaaataacggctgtatttctcgtaatcgcgcggaaaaataataacttccaccgttccaaacagatcctcaaccgtgatgaatgccatcgctttgttctgcttggtgtatttgatggtcttttcagtgatgatgcccccaatgacaacactctggttatctttgatctttacggcattcgtttcttcatccagcataaaatctgctgtcacggcgctgatatttttgcgccatttttcctcatattcctccaacggatgtccgcttaaataaatgccaagaacttccttctcaaaaccaagtttgatctccttggtgtactcctccacattcgggaaccggacttcatacgcctttttttcttcctctgagacaaggtcaaacaaagacatctgcccggcaagcgaatttttcttttcctgattcaggttatcaatcagcgtattatatactaaaagcatctgctgcctgttgccgtctaacccgtcacaggctcctgctttgatcaggttttcgactgcgcgcttattgacctcacgccccgccacacggcttaagaaatcagagagcgtggtatattttccgttcgcttctctttcagctaaaatgatatcaataacctgtctgccgatgctcttgattgcgtacatgccgtagcggatcccatcttttgttgccaaaaagcgtccttctccctcatt

SEQ ID NO: 5251 - DNA, 9053 bp, Unknown
  gut microbiota DNA sequence
tcaaccggataataatattttaaatacgccgtctgataagcaaccaccgcataagctgctgcgtgggatttgttaaatgcatatttggcaaaatcgaccatggaatcgtagatctggtttgccgcctgctcgctgattccgtttgcgatacagcctttgatgccctgctcttcattgccatagacaaagttctgacgctccgcgtcgatgacgtactgtttctttttactcatggcgcggcggatgttatcagcctgtcccattgtataaccggcgaggttctgcacgatctgcataacctgctcctgatagacgatacagccataggtcggctctaagatcggctctaattctttgcagacataggtcacactctccggttcattttttcccttgatgtattttgggataaagtccatcgggcccggacgataaagggagataccggcgataacgtcctctaaactctgcggttttaactccttcatgaagtttttcatgcccgcactttctaactggaatacaccgtcgcatcttccggttccgatcgaatctaatacttttttatcgttataatcaatgttatccacatcaatttttattccatgatttttttccacaagtttgactgcatcactgatgacagttaaggtacgcagtccaaggaaatccatttttaaaagtccgagttcctcgatcgttgtcatgacaaactgtgtcgtgatcgtaccgtcagaacttcgcgacaacggcacatattcgtccatcgccttctgggagattacgactccggcggcatgcatggaggtatggcgcggcagaccttctagtcttttcgccatgtcgatcagtctttttaccgtctcatccgactcatacatggaacgcagttccgggttcattatgagtgctttgtcgatcgtgatattgagctcgtttggaatattttttgcaatcgtatcacagaaattatacggcagatccatgacacgtccgacatcacggatgacaccgcgcgccgctaacgtaccgaaggtaacgatctgcgttacacagtcttttccgtatttttcaataacgtaatcaatgacttcacttcgtctctcatagcagaagtcaatatcgatatccggcatggtcactcgttccggatttaagaaccgctcaaacagcaggttataacggatcggatcaatattggtaatgcccgttgtataagacacaaggcttcccgccgcacttccccttccaggaccaaccggaatgccgtgtgttctcgcatagttgataaaatcccacacgatcaggaaataatcgacgtaccccatcttctgaatgacagaaagctcatagtcaagcttcggcaaaagctcctcatgcttgtccgggtaacgtcttaccagcccctcatgacagagtttgttcaggtaagtccacgaatcatacccctccggcacgtcaaaatgcggcagcttggtcactccaaattcaatctccacattgcagcggtccgcgatcttctgtgtgttgtcaatcgcctgtgccgcatatggaaacagcgcgcgcatctcctcctcagatttcacaaaatactgcccgccctcataacgcatgcggttttcgtcggacagttttttcccggtctgcagacagagtaaaatatcatgcggctcggcatcctcagcgtaagtgtaatgtacgtcgtttgttgccaccagctcaatacccgtctcctcactcatccgcatcagacctgcattaacggtcttttgatccgggattccatgatcctgcaattccaaaaagaaattgccttttccaaaacatttttcatatttacaggcagtctcttttgcctcctcataaagaccacgcaccaggtagcgctgcacctccccggcaagacaggcacttaaggcaatgataccctcatgatacgtctctaagacttccatatccacgcgtggtttgtagtaatatccttccacgaaaccttttgaaactattttcatcaggttctgatacccctgattattttccgctaaaagcaccagatgataataacggtcatccccgtgtgaaagttccctgtcaaaccgtgatcccggcgccacatagacctcgcagcctaaaaccggcttaatccctgctgcccttgctgccttataaaaatcaatcacgccgtacatcacaccatgatctgtgatggcggcgctgttcatcccgagttctttgactcttgaaacatattcttttatcttatttgaaccgtccaaaaggctgtactctgtatggacgtgcagatgcgtaaatgacatgctttgtttcctccgcattctattatatcgtctccctgataaatattcaatttttttcgcacatctcatacaatctcatacaattttctgttactgttcactcgtacctcgttccagtaacggattttgccgatgcttcgcattccaaatcggcaaaatctgctgccaccactgtatcatacggcattttcagttcagaaaatgcctgcctgtgaacagtaacaattttctctctttgtctatctgactgccgtgtctgcctatgcatcctctgccggcactttgtttacggtatcatcttcctgtaccagaaccagcgcagagataccttcgacagtaacagaaccttccgccgttccaagagatctgcatcctgcctttttaccattgacacagatatcccacgtcccggcaggtaagtttactgtgactgcatccggatttccattatagatgactgcaatattctgtgccgtttctccctgtacctcaccctgaatggtatatgctacgacatttgcatcaagtccagtcataaaggtaagattattctgaattgcagcggctgttgtcatgcgcagtgcactgtgtgccttacggaatgcgatcagacctttataatattcataaacatccattacgttacctttattatcccacttaatgctgttcgttgcatcaggggaagaatagctgttctcatcaaatccagtctcagacttctcatttggcttagagcgaagcatctcttcaccagcctgcataaatggtacaccctgcgaggtaaaaagaaccgcgcttcccagcttattcatcttcactctgtcagcctcactgtcatctgcattggaaatggcaagcttatcccagaatgtcagattatcatgacaggatatataattaatactctgtcccggctgtcccgaccagttcgtacacttatcaccagcctttgtgagcgtaacctgcgaatgcggggttgctgctacaacactgaatttaatgttttcttccatattatctttgccgcttacaaaacctttgtccagaaaatcaaatacactgcctttgattccatcacggatatcatcactgaaagcacccacacgatccagccggtaaatattgttcttcgttgcctgctgtgctgccggcaatgcagattctcctccagtccatccttcaccatataccataatgtcaggattcacctgatccagtgcttttctgacagccttcatggtatccagatcatgtacgcccatcaagtcaaaacggaaaccatctatatgatattccgttgcccagtatacaacagaatctacgatatacttgcgcatcatggcacgctccgaggctgtttcattaccacagcctgaaccatctgaataatgattgccattctttctgtagtaataatctggcactgtcttctgaaaccatgaatctgccagatgataagtatgattatatacaacatccatattcacgcggattccattttcatgaagtgtcttaatcatctgcttcatttcattgacacgtacttccccatgatatggatctgtactgtaagaaccttccggcacattatagttcttaggatcatagccccagttgaactgcgctgtgtcgggttttgtttcgtctaccgtagcataatcaaagctcggcagaatctgtacgtgagtcactccaagatccagaatatgatcaagtcctgtagccagcccttccctgttctttgttccgcgctctgtcagtccaagaaacttacctgtattccgaatcccggaagaagcatcggaagacagatcacgaatatgtacttcataaatcactgcatctgtagcattattaaatgccggtctgacatctgcatcaaatccatccggatcggcagctttcagatcaaggatctcacctctgttgccatttacgcctgcacttcttgcatataaatcaacaacttcatttactttattaccgatctgtactgaataagtataatatacaccattcaggtctcctgtcttttcacacacccaggttcctttgacatctgctgtcattggaattgtttctatcaaattgtcaccatcgccctgctcatataggttaagcgatactttcccggcagcaggtgtccatatacgaaatgttgtcttttcttttgtatatacagcccccagatcgttaccgtcatataccaattcatcattaaaataagtagaaccaatctttcttttcatcgataccatacatccttaatagccctgtctgttcaaagaatcatcctgttacccgcctagtatacctctcccttttcagttcgtccagttaattttttcgttttttttcgtaaattatcctattttgtcaggtatactaccgcttcatacggacggattttttctgaaatatctttatagtttcctatcagaattccccggttttcttttaccatatccgcaatagaagccggaacatccagttctttttccgtgaaattgcagattaccagtatttttttattctcggatgatcttgtataaatgtaaagattttcatctgcatcttcaagtccgtcgaacgttccataaacgatcacttcttcctctttgcgcagttctatgagtttcctgtagtaattgtatatggaatccggatcttccacctgagcagccgcattgatcgttttataattcggattcacggcaaaccatggcgttcccgtggtaaatcctgcattttctgaatcatcccactgcataggtgtccttgcattatcccgtcctttcttactgataatgtccatcatctgatcatgcgtatatacttttgtatcggtaacaagatctatataaatatttttttcttctatatcgtcacattcagacacatccgaaaaatgcatattggtcattccaagttcttccccctgatatacatacggtgttccctgcatcatgtgaagacaggttgcaagcatctttgctgaaagctccctgtattccccggaatcatttccccatctcgaaacaaccctgggctggtcatgattgtcccagaacagactgttccatgctacttcctctaaccctttctgccagcggtttaaaacttctttgagatccggaagataaagtttcttatctgtccactttccatgttcatccgaatccacatccatatgctcaaactggaataccatgctcaactcttttccatcgcttcgcgcatatttttttgcctcttcgagcgtaacgcatgatgtttcacccactgtcagaaggttatacctgcttaatactttttggttcatctcctgaagatattcatgttcatgaggtccattggctgtgactgcaccacaaaaagaatatttttccccttcttttaccggaccatctttgtattcttccggcttgctgatcagactgatcacatccatccggaatccgtcaatgcctttttcacaccaccatgtcatcatatcaaaaacttcttttcttaccacaggattatcccagttaagatcaggctgttccggcacaaactgatgcagataatactgtccggttgtctcatcaaactgccatgcagatccactgaaatatgatccccagtttgtcggttcatgaccatctaccggatctttccagatataataatcgcggtatttattatcttttgattttctgctttccagaaaccatttatgctggtcagatgtatggttaacaaccagatccattaccagtttcattcctctttgatgaatttcttttaataattcatcaaaatcttccattgtcccgaactcatccattatatcctgataatcgctgatatcatatccgttatctttatttggagatttatagatcggggatacccagataactgtgataccgagattctttatatagtctaatttttttatgatcccctgaaggtctccgattccatctccgttactatccataaaactccttggataaatctgataaacaactgcttctttccaccatgctttctgcatcttttttctccttataaatcagcggtcatgatctcaatgactgccagtctgatctctttttttaaattcgtcgtctcaagctcgcctaagatatctgccagattttttccactacttaaaagccggtatgcagactcttttgcaagattactgtcctgtgcctgattcagcagatcatacacacgctccagtgtatggttgtcatttaatgtcagtttctgttcaaaaacaatttccactttttcatccactgacactttcggaatgtggattctgatacatcccttcttccactgatattcatacgttattttgatttcttttccacttatgtatactttaggcactgcctctttcactccacacagttccactgtataatcccggaattccgggatcagatctgtctgtccggccgccccttcgattgtgaacgcccctctttcccagtcaaaatgcatggatgtaaagcaacagctcctgccatctttataatcctcggtttcaccgtcatcctcataatgtgtataattgccatccgctccgccatagactcttatgataagttcttccggatttttcagaaaatcttttccgaacagttctttctgcatcggaatgatgcctcctgcttttacaagcaccggaatactgttaatgccgcggaacatccacattactttctcacctttatagatcaatccggtaaagaaatcgtggtaacagccttccggtatccacgcttttacttttccctgatttaaactcgctatctggtcacttgtaatcggtgcaacaatcatatctgttccaaaaagatactggttgttgcttactccctcaacaaaagaatgatcctgaaccggatatgcctgttccttttccggataatcgtaatacattggtgcaatgaccgggcggtattctttgtatgccagatagttcatagtgtaaagataaggcagtaactggtgccttaagcgcagggcttctcccatcgcatgttctacttccggtctgaaattccatggttcttttccactgaacgacatttttgtactgtgcagcctgttgatcggggaaaatgtccctaactcataccagcgtgcctccataacatctgaccggattccaagcatatgtccgcctatatcatgactccaccatccatatccaatatttgatgccgttgctgtaaaataaggctggaaatcaagagactcccacgttacaactgtatccccggaaaaacctaccggatatctgtgagaaccaggacctgcataacgtgaaaatgtcatttttctttttccatcccgtccactgtcaagataatggtaatgattcagcatccaaagcggatctaactctttcactgccgtatgtccaccctgctgccagtccagccaccagaaatcaaccccctcttcctcaagcggatgatgtacgatctcaaaataattttccagaaactccggatctgtaatatcgaattcaaccggttctccggctgccggatccattcccattgcctctgccatttctttatacatactttcgcattcccggataccgagtgccggatgcacatttaaagtcactttcattcccctgtcatgcagattatccataaaactccccggatccggaaacagatccctgttccatgtataaccggtccagccggaaccatacttcttgtcaatatctgtgatatgccagtccatgtcaatgactgccaccgaaaacgggattttttccgctaagaaacgatccatcagtctctgatactcatcctgtgaatactcgtaatatctgctccaccagtttccaagtgcatattttggaagcattgggacacggccggtaaccctaaaaaaatcttttaccgcgccccggtaatcatgaccataggcaaacagatagaaatcctctcctccctgttttctctctttgatccagccatcctcggtaagtaaaatcgtttttgaatcatctaatactgcaaatccatccctggaaagaattcctttttccagtctgatcctgccgtctgcttcatcgagcgtacgggcagttccgaaaagattacgatcctcttttctgccataataccattccagatcacatccattgtccggttttttcagcttcacactcaggatgctctcatcaaatgctctctcatcatagcgtatccgtatgctttttgtctggatctccagaaagttatttttctgctttatctcaaaaggaacctcttctaaatccctgtaccatattacctgcgaagcctcatccacaaatgcaccggattcattatattcaaatctgaccagcctgtccgtcagaaatgtaatacggtaattttttccaagaacaatattccgcggatctgcttttggtcttctttcacatataaactgctgtttcatcgtctattacacatcctttcgtatttttacattttgaaaaatcttctttaagaaaaaactgttgatccatgcaattcctgagataccgatcagaaaccagataccaaatgcaattggaatttttgaaataataaaaaatggaagggtattcaaacccagcataagcaatgtatatggaatattcgagattccgagcaatacggcattcctcacagttgctttcacagtattctcaaagtaagattccattggaaa

SEQ ID NO: 5252 - DNA, 7694 bp, Unknown
  gut microbiota DNA sequence
ttttcacaagctcatttctttgttgatgcgcgtttcataagtttgtattccattggtatccagtctggtacacggtttccttcaatcatgctgatgaccgtattcgcacacgctacgcccattttgtaaggatactgcttaatcgatgtaatccctccgtgaatatactgtgaaaccgtataatcatcaaaccctgctattgctacatcatccggcacccgtactccaagctgtcccatgccttcaattgctccaatcgcaatgctgtcactcacacaaaaaaaagcatcaatctccggataacttttttttaattctattgacttttgaactgctattttctgctcaaacagacagtcctcgatccattcttcccggatgtggagtccatgtttctctaatgcacgcctgtatccacactctctgcgttctgacacctgcgccatcttcttaccggaaagcattgcaatattacggcatccattctcaataagatgctctacttcttcaaaagatgctttctcattatcaacggaaacctcacatacatggtcgctttccagcgcaacatccacaaggacgcagggaatctcactgtttttaatctgctcatagtacggcatatccatagcgagcccgtcaactatgattccagccagtttctttttcttgcagatctgcccaaaactgatttttatctgcttgtttgtcggcattgtaagaatcgtaaattcatactccattttctgggcaatcttataaattccactcgtaagtccaaacataataccgctcggatcttcttccggcaattccccggcaagcagcagtgcaattgtcttcttctgtatgcctcttagtgaacggccagcctcatccggtatataatccagtcgtcttgccacctccatgactttctgtctggtcttttcactcacatctttatagccgttcagtgcatgggataccgtagtcagtgatactcctgcctcctgtgcgacatcacgtatcgtcgttctttcattcagatataactttctgtctttcgccatatgatcccccattgcattacatttttcagtgatttgtaaccatcttatcacattttatcatgatattccaactgcaaagcaagcaattccatccatatttttcctgtttatattacttgtaattcttattttacaatgtccagtaaatctttaaatgtagacagcttataatctgctttgtcataacctgccgcatcgccgatcgcaattgctgtcatatgaccggaaactgctgcatcaattcccgcatatgcatcttccacaacaccgcactcttccggcttcaagccaagaaactctgctgcttttaagaaaacttccggatctggtttggattttttaatatttgttccatccgaaattgcatcgaatttgtcgataattcctgttctctcaagaatatattttgcattcctgcttgatgatccgattgaaagcagatatccccttctatgcagctcatctaaagtttctttcacttcatcactgacatctgccggtgtcatctgctctaaaagttttttataaatatcattcttctcttccgccatcttctgtttctcctcatcgcttaacggatgtccctcatatctttccagaataatttccaggctatccatacggctcactccgcgcagccggttgttgatctcctgatcgaagtaaatacctttctcatccgccatctgtttccatgctttataatgatactgatctgtaaacacgatcaccccttccagatcaaaaataagtccttttaatgacatttctacacctctatactttctctcgctcttagttttccgatatcatcctgtgtgtcttctctcttgtctatgttcatgcgtccagttaccaaaacgttttggtaaatttatattatcatcctctattttaaaaatcaacaacgttttggtaaattgtcaataaaattcatgtactgcaaaaactgcggttgaattttacagctgacaagcctttctttccatacttccatccggcgaaaaaaaaaacaccggcaagtctgtttatattggtgttgaatgatttgtagtaaataaagtataatgtccatgagctcattttgacacctctcaaaatacaaagaaaggaacactatgaaaacaggacttgtagtagaaggcggtggtatgaaatgcgcatacagtgccggcattctggataaatttttagacgatgatatcacattttcctactgcatcggcgtatctgcgggtgctgcaaatacgctgtcttatcttgcaggacaacggggacgtaatctccgtttttatacggaacatctaagggatccgcgctacttaagcgtacgaagtttagtacatactggaaacttatttggcctgcagtatatttacgggacactgacaaattccgatggggcagatccgcttgattactctgccgtcatggaaaatccggctgaattttatatgcctgcaaccgatgccgcaaccgggcgggcaacttatttttccaaatacgacattgtccgtgacgactaccgtgctgttatggcaagctgcgccctgcctggtttctgccgtcctgtaaaagtaggggaccgttactattacgacggcggcgtcgctgactcgatcccgctgcaccatgcgattgaacatggttgtaccaaaatggtcgttatcctctcaaacccgagagatttcgtaaaaaaaccggaggcgcatcgtccgctttacaaacatatgctgcacaaatatccgaaaacgatccaaagtatcgataaccggcatatcaattaccaggcatccatcaatcttgcctgccggttagaaaaagaaggctatgtttttatttttgcaccaagccgccatatgccgcttagtactttttccaaggatgctgccttagaacaggatctttatgatctcggagttgcagattatgaagcccgcgcagaagagttgaaacattttttgaactaatttatcttacaaataaaaggacttttaccactatgaccaaagatcttaccaccggaaaaatcatgccgatcctgatccgctttacgatcccgctcgtgctcggcaacctgttccagcttacctacaatgccgtagacagtatcattgtcgggcattttgtcggaaaagaagcacttgccgctgtcggcatctgcaatccgatctccactctgatgatcctgtttttaaacggactgtgcatgggtgccagcattttaatgggaatgcagtatggggcaaaagattatgacacgctgcaccgccagatcagtaccaccatgctctccggcgttattttttcatttgtcttatccatagcatgtatcctgtttgcaagaccgatcctgatcttaatgcaggcagatgtaagtattctatccctcacaacagaatacttacagatcatctttttaggattggtctttactttcctgtacaactttttttcgagcacactgcgtgcactcggtgacagcaatacccctctttattttctgatgatcagtgccgttttaaatattttaggggatctgttttttgttgtcgtgttgaaagccggcagcaacggctgcgcggtatctaccgtgctgagtgaagccttatgctgcgttttctgtgtcatctatatccagaaaaaagtgccattattaagacttgggaaaaaatggctggtgtttgaccgttcacttttactgcgcacgattgcatatggctggacatcagcattgcagcaggcaactgtacagctcggtaaactcgggatccaggcgatcgtcaacaccatgggtgtttcggttgcagccgcatttgccatcgtaaacagaatcgatgattttgcctacacgccggaacagaatattgcgcacgccatgactgccctgatggcacagaataaaggtgccggaaaaaaagaccgcatgcgggagggattccgctgcggtatgattcttgaaattatatacgggtttattgtatttgcactctgctttttatttgccagagaatttatgctctgctttatcaaagatgaggaagtcatcggtcacggtgttatttaccttcacctgatttccctgatgtatgtcctgccggctgtcacaaacggtattcagggatatttccgtggcatcggagatttaaagatcacacttatcagcagttttgtaaacatgggtgtacgcgtacttgccgctgcaccacttgtcctgaaaatgcatcttggtattgaggcacttccatattcctatcttgcaggctggatcgccatgctgatcgtggagttaccgcttttgctgcgcaaagtgcacagcaaataaacaaaatttttcagatttcttcctcatcatgttccttcatcttcaaaatacaaatattgaaaaaaggactctatccgttttggggataaagtccttctttttctattttgtatctatgcaattatctcttcaggcacattgtctgattctctcgctaccatccacaatctgtcactttacgcgcgcagtcagatggtctccttccacgtcaatcaggatcgtatcgccttcccttacctcatctgcaagaatcagttttgcagaaagtgtctccacatgtttctgtaagaaacgctttaacggtcttgcaccgtaaaccggatcgtatccgttgtccacgatatactgctttgccgcatctgtcagctctactgtaatctcacggtcagagagacgtttgttgagatctgtgatcagaaggttgataatgttgccgatattgccttttgtgagcggcttgaacatgatgatctcatcgagacggttcaaaaattccggacggaaatgtcctctcagttcattcatgactgcctcttcacactccgggttgatatctccgttgccgtcgattccttcgagcagatgcgccgaaccaaggtttgacgtcataataatgatcgtgtttttaaagtccacagtcctgccctgcgaatcggtgatacgtccgtcatcaagtacctgtaacagcacattgaatacatccggatgtgctttttccacctcatcaaacagtacgacagaatatggttttctgcggactgcctcggtaagctgtccaccttcatcatatccaacatatcctggaggcgctccgattaaacgggagacagaatatttctccatatactcactcatatcaagacgcaccatgttagattcatcgtcaaacagacttgccgcaagtgccttcgcgagctccgtcttaccaacaccggtaggtcctaagaacaggaacgaaccgatcggctttgtcggatctttgattcctgctttggaacggatgatcgcttctgtaacctttgtgaccccctcatcctgtccgatgacacgtttgtgcagttcctcatcgagatgaagtgttttgtttctctcactctccgtcagttttgcaacggggataccggtccagcgggaaataatacgtgcaatctcctcctcactgacattttcatgtaccagagaaagatcacggttctttacttcctcttcttcggcttccaactgtttttctaactgcggcaatttgccatactgcaattctgctgctttttccagatcataattctgctgtgcggtcttgatctcatttttgactgtctcgatctcctcacgcagtttctggactttttctaccgatttcttttcattttcccactgcgctttttttgtattaaacgtatcgcgcagttctgccaattctttctgcaggtcagcgagacgctcctggcttaacctgtctgtttctttctttaatgcggtttcctcaatctcaagctgcatgacacgacggtttaattcatcaagttctgtcggcatggaatcaagttctgtcttgatcagggcacatgcctcatccacaaggtcgatcgctttatccggcaggaaacggtcggaaatataacggtttgagagcactgctgccgatactaacgcagagtctgtgatctttacaccgtggaacacttcgtagcgctcttttaaaccacgcagaatagagatcgtatcctcaaccgtcggttcatccaccatgaccggctggaatcttcgctctaacgctgcatctttttcaatatattcacggtactcatcgagtgtcgttgcaccgatacaatgcagttcaccacgcgcaagcataggttttaacagctgtccggcatccattgcgccgtccgtttttccggctccgacgatcgtgtgcagctcatcgataaacaggatgatctgtccgtcagaatttttgatatcatcaagaaccgctttcaaacgctcctcaaattcaccacgatacttcgcacctgcgaccagggcacccatatccagtgcaaataactttttgtcttttaagccttccggcacatccccttttacgatacgctgtgcaagcccctctacgactgcggtcttacctacaccaggctcaccgatcagtaccgggttatttttcgtcttacgggaaaggatgcggactacattacggatctcatcatcacgtccgatgaccggatcaagtttctgctcttttgcacgcgctaccatatcgtaaccgtatttttcaagagtatcataagtagcttccggattgtccgaaacaacacgctggttgccgcgcacggttgagagtgcctgtaaaaaccggtctctcgtgatcccatactctttgaagatctccttcatcgccttgttcggatattttaacaatgcaagaaaaagatgctccacggaaacatattcgtctcccatctgctttgcctcgtcctctgcatggatcagcactttatttaagtcctgtccgacatagacctgaccgccggatacctttacccttgctgcgagatgtttctttgcgttatccagaaaatgctctttctggatatccattttttctatcagttttaaaatcagtccgtcttcctgctgcagcaatgcaacaagcagatgttcctgctcgatttcctgattgccatattcatatgcaagtttttcacaatcattgatcgcttctacggacttctgtgtaaatttctgaatgttcatatattcttcctccctcttattcaattgtggtccaaactggacatctatatcaaatgatggcggaccatcatgagttttccctcttatttatatctttttccgtttacaatttgtgttatacacccgattgttagcactgtcaagaggtgagtgctaattattttataaaaaaaatataaactgtcctgcgaatacgatacgatatgctctgcatccgcaggactttttccctcacaatcccctattcttctatccggatcacatcttttagcacataatgaaacgaaggtgcagacgcaaactcattctccgtatatccctgattcagatcataggtatcgtccggatcatccggatctgccccgacataatctccacggaacacatccagtttcccctgcttaaactgccggatcacttcctgcattttttccgctgtgccatcagcagccgtgatttcatttaattctaacatctgcacccagtcttcttcaaaaccggcaccaatatcatttccattgacagttcctttgatacttttctcaatcacacggtcgtttaaa

SEQ ID NO: 5253 - DNA, 25171 bp, Unknown
  gut microbiota DNA sequence
cagatattctcccataatctgtttgcggtagtttcggatcgcaatataatccagatccggatcatgaaacatttcttttaaatgctgtggtgcatacggctgtccgagtgaccgcatggtaagtgcctgctcgtccgtcatctcatatccaaaatgcgctaatgcctttggccagaacatgcggtaatatttttccgtgtcgatcagtgtgccgtccatatcaaaaattacggcttttatgttttttgtattcatgcttttcctcttctatcccgaaccattacctcaattatacaacaaccggctgcataaatcccagacagaactattgtcgtgaattagaatattttaacacatttattttcacacgacaacgctatttcgaatggctgatacattctgacggatggcagagccaaaatcttttgaaaatgattcttttcgcatacgaaactgtcacagaggaagcaaaagactatgtatctttatgacctgcatacaagacaaactatatttcagacgttccatcgtggctcttttgcataccccataaacagatcaaagatcgcacggtagccttcttccttgatatgcattccctcaatcgtatactctgctttgagatttccatcccggtcttttaacggatcattaatatctatatattttgcatgatgtctttccgcaagctcctgcactgccttatttgccatcgcaattttccccggtaccacttcctgattcaatttactgtaacgtgcaattttttcttctttcgtcatgttaatcctcctcgaattccatttccttaataaatgcttccacttctgccggcaaacgttcctcgcgccatgctaacaatatctcggttgtaagatcagcgtccgtaatgccataaacactcatcgagtcagacacacgcatggactctggcaaaattgccactccaatccctttttctgcaattgtcatcgctgttcttgcatcctcacattcataatagatatcgcaggtcagtccaacagcctcaaacgctgaaataatataattccgataccggtgtgataatatcagatgttcctttgacaattctctcaaactaatctgtgatccatcctttttcctgaatccctctattccctcatatccatctgctgccacggcagccagtttttcccgaatcagcctctttgtcttacaaccgttcagcgtgatcggcgtacgcagtgttgtgatatctatcatgtgcttttctaattgttcttttaaattgaatgtcgatccctcatgaatatcaaaatgaatccccggatattgttttgaaaacctctcaatatattctgacatcatcagaaccgtagatggtgtaataccaatatgtatcgttgcagactggcttgccttgaccacctcacgctttgtaacatctaacatttttaaaatactgccagaccttgcatacaacacctttccagcttctgtcaatgcaattttctttgttccacgaaaaaaaagctgtacatcaagttcttcttcaagcattttcatctgataactgaccggtggctgtgtcattttaagaactttcgcagcaccactcaccgttccctcttccaccactgcacgaaaatattccaactgtctgatttccatgtttccctcctctcctgtttttgtcagtatatataaaaaatattgttttatgatataaaataaatattttttatatattataatttatgctatactggttttcaagaattgaattttttcaaaaaaagaggattaccatgaaacgcattgattttgaaaacggaaccgtaactgaaaatatattaagtgctgccctccctatgcttgcagcccagattttaagtctgctctataacattgtagaccgcatttatattggtcgtatcccgaatatcgggaccacagcgcttggtgctgtcggactttgttttccgcttattatgatcatcacggcatgcagcaatctgttcgggagcggcggcgcaccgcttttttcgatcaaccgtggaaaaggtgataaagaacaggcaaacaggatcttaaatacctctttttccatggtatgtgccagtgcactcctcctgatgggaaccggtcttctctttgcaaaaccgcttctcattctttttggtgcctcaaaaaatgctctgacttttgccagaccttatatgatgctgtatctgctcggtacacttccatccatgattgctaccggcatgaacccttttatcaatgcacagggttattccacaaccgggatgttttccgtggcaatcggtgcaatcgcaaacattctcctggatccgctctttatttttaccttccatctgggcgtaaacggtgcagcggccgccactgtattgtcacagattttatctgcactgtttgtgtttcattttctgcgccgcaaagcggagatcaaagtccgcctgcttcgaaaaaatgaactttcctcctgcattcctctcgcgaaaagtatcatcagcctcggtacatccggttttatcatgcagctcaccaacagtctcgtctccatctgctgcaatcatgtactctccgtcaccggtggcgatgtgtacgtctctgtcatgacaattgtctcaagtgtccgccagatggtggaaactccgatctatgcgatcacggaaggttcctccccaatcataagctacaactatggtgccctccgccccacgcgcgtcaaaaaagccggcatcacgatggctcttatggcgctcgtctataccggcctcatgtggagcgtgatcattctcgccccggaatatttaattagtgttttcagttcggatacagcactgtcagcagatgccgttcccgcattaaaactgtattttgctgcatttatctttatggatctgcagtatatcggtcagactgttttcaaatctttaaacaaacggaaacaggcgatcttcttttccctgctgcgcaaggtgtttatcgttgtaccgctgacctatcttctgccatacactttccacatgggaacggacggcgtatttcttgcagaacccgtatcaaatgtgatcggtggcagtctgtgttttatcacaatgctgtttacggttctgccggaactgaaccggatggaaaatcagtaaaatatgctttcagctccgccacgatcatttcctgactctccctcgtgtggatcagtgcataataatgcccgccgccaaattttgaccgtctttcctcttcgcatattcccgctgcaatgcctttttcggtcacacgtctgatgcgggtttcgtcctgttcctcttccttcaaatagcctttttgtacgagcagatcattgacaaaagcagccgtcagctttttgcggtctttttcctcacagagcgcattgatccggtcggtcagttccgataccatgcaggtgtcagaaaacgttacctgatctaatttttccggtgcaatataaaacggctgtttcttttttcccgccgggggcttcgacacaatttctactaccgcagctccttctgtctttcctgtcgtcatattttttacttcatgtgtctgtaaaaacatccggatgatctctgtaaaactttccccgtagcttgcaatcttctgtgcacccattccgtatacatccgccatctgtgttttatcggccggacatctggcacacatatcttttaacgtcttatcggaacagatgataaacggcggcacaccctgttttgcagcaagttctgaccggcatttgcgcagtttctcaaacagctcctgcccttcttccgttaaatctgcaagttctgctgtctttttctttgcacgtccggtctcgatataattttcctccacctcgtcctctgtcacaacacagttactgcatttttcacagatgcacggactgtgatccccaaaatagttcaggatatactggcgcagacactcatctgtctcacagtagtgaatcatctgattcagtttccgctgttcatttgcccggactgccggatctcctgccgtataaccgccctctgtcgccttatagtcaagcagccgtttgttgatcatgatatcctgtttggaaaagaaaagcacacactccgcttcctccccgtcgcgcccggctcttcccgcctcctggtaataatattcaaggctttgcggcatattataatggagaacataacgcacattggatttgtcgatccccattccaaatgcgttggttgcaatcatcacacggatcctgtcataggtaaaatcatcctgactctctttccgttcttccaaagaaagccccgcatggtaccgccctgccagaatgccgtgctgcaataaaagttcacagacactatccacattcttttttgtcgcacagtagatgattccactctcatcctcatgccttttgacataatttaaaatactgttgtccgtctcttttccaccttttcgctttacgacacggaagaaaagattcggccggtcaaacccggtcacgacagtcaccggattctgcaggtgcagactctccatgatatcctgtttgacgcgctcggtcgctgtcgctgtaaatgcgctgaccacagggcactttggcagtcttgcaagaaaatctgcgatctctaaatagcttggcctgaaatcctgtccccactgggaaatacagtgtgcctcatccactgtcaccatcgaaatgtctgcccggcatgcaaaatctaaaaaacgcatggtatttaaccgctccggcgcgacgtagatgatcttgtactgtccctgtgccgcatacaaaagcgccgcccggatctgattttccgtcagtgagctgttgatgtatgccgcatgtacgcctgcctggttcagtgccttgacctggtcagacatcaaggagatgagcggtgagatcacgatcgtgataccgggcagcatcagtgccggaacctgataacagagtgattttccggcgccggtcggcatgatgccgaggacgtcgctgccatttaagatgccttccatcaagtcctgctgaccaggccggagggtgtcgtatccaaaatagtgtttgagtgtctgatataaattcaaaatttgtttctcctttttacattgctatccagccaaatgcatttgccacggaactgatcagtatgatcagtgcaaagaccgggcacagatatttgatcatcacaataaaaatctttttcctgcggaatgtgctctctccgtgcatgatctcctcttccatccgcttcattccgacgattctcgatacaaacaggcttgtgagcattgccgcaatcggcatcatcacagagttcgtcagaaaatcaaagaaatccaaaaactgcatgccgataattttaatgcctactaacggtccatatcccagtgaagataaacttccaagcgcgatcatgatcactccgactaaaaccgttgctcttcttctgctccatcccagctcatcctcaaaggtagaaaccgcgctctcagtcaatgcgatagaacttgttactgctgcaaacagtactagcaggaaaaataagattccaactactgtcccaaatcccatattctcaaacacttttggaattgtaataaacatcaatgccggtcccgcctgcagagtatccgggtcgccgcccgaaaatgagaacaccgccggaatgatcatcagtcccgccataatagcaatcgccgtgtcaaacacttccacatttcttgtggaatcttccagtgatgtttcttttttcatataggatccaaaggtaatgaggattcccattgcaatcgacagcgaataaaacatctgtcccatcgccgctaccaccgtcatccaggaaaagtttttcacatttggcacaagaaaatattttaccccctccatggcgcccggtcttgtcacggaatacaccgcaatcaggacggataacacgatcagtatcggcatcataaatttcgatacacgttcgattccgtttcgcacccctgcgtaaatgatcgtcagagtgaacagacagaacaggataaaacagagttccgtggatactccatctgagataaactccgaaaaatatccgtctgccgccagcatttttccatttcccctgatatactcgatcaggtatttgatcacccagccgccgatcacggaataatacggcacgatcaataccgggatgatcgcattgatccatccaccggctgacagccatccggcttttccaaatgcctgaaacgctcccaccggacttttccttgtcatgcgtccaagtgccgactcagccatgatcatcgtatatccaaacgtcagtgccagtaaaatatagatcagaagaaaaatccctccaccgtattttgccgccagatatggaaatctccagatatttccaagtcctacggacgcacctgcggcggacagtacataacccagtttcccggaaaaagaacttcttttgttgtcgtgtgtgtgtaaattgctcatatctttttgttcacggtttgtgaaacagtctcccttcattttttgttttcttctctattaccgcaccagccggaatgtcttttccaccatgaaaaacattaacacaatgaaaatcagcacatagaccggcagcaatgtgatggaaatatgatttgcgatcagtccaaaaaccggcggcataaatgtagagccgacataagcactcgccatctggataccgatgattgcctgggaatttttctctccaaaatttgccggtgttgcgtgaatgatcgatgggtagaccggtgcacatccaatccccatcacgacaagtcctgccagagctgccgtgtcagacggaatcggcagaagtactgcagcacagccagccagtaaaatagttgtgccaagcctgatcatcttatgatcacctaatttttccgtcacaaatcctgccaaaaatcttccgagcgtgataccgctgcagaacaatgccgcatatgccgccgcacgctccgcagagataccttttgcaccgaccagataactgcttgaccagaggatcagtgtagattccaatgcacagtaagagaaaaatccaagcaagagctgtggtacgcctttgatcttcactgcaccgcgtattccaatcacctcgtgctgctcttcctgctgttctgccgttttgttgactttccagaccggaagtgtcacaaacagaatcattgtgatccccatctgaagaaaagataccatgcggtaaccgttctgccaggatgaggtggtcagtgcatagctcattatgtacgggctgatgattgttcccacgccccagaaacaatgcagccagctcatatgttttgatgaataatgcaatgcaacatagttattgagtgccacatcgatagctcctgcgccaagtccatacggaatcgcccacaggcacaacatgtaaaatgcgctcgacgtcgaaaaaccaaacaaggcagctgccgttaacaggacactgcataccgtaacgatctgtgttccaaatttctttgtcaggcgttccgacattaaacttgaacagatcgtccctgcagagatgatcattgtgaccagtcccgcataggacagcggcaccgaaaatgcctcatgcatgatcggccatgccgaaccaagcagagagtccggtaagccaagacttataaatgccatgtaaattaacagtaataatagtgtgtacattttttgctcctttatttatccaattcgccgtttgccacttatacaagtatcttgactcgcttcgcccggcagtcttattatatcttgaagcaatgcttcatgatcatgatctgcacgagcttcgcccggcagtcttattatatcttgaacgccatcaaaaatccacgcaatattatagaatattatcccataacatggtaaaataaagtaaaaatattatttgtggagatctgatcatagatgaacttaagacaaaataaagaaaaaaacgcacagcaaatgttgacaggcgtaattttgacattatttatcatgctcctgctttgtaccatatttacaaatcaggatgcagcctctgtaagcaaactcaaagcacgtcagcctgacaaaatacaatacctggatgatggaatggtactgcttagttttaacattaaccgcaatgaaaacagcagaggctcacttgtattttttacctcacatcagcatgtgaccgtttttactaaaaacaacgtaatatacaatttggatgattccggtggaatatgggggcatacaacaggaaatgtctggaattttgtaaaactgccggcatatacagaaacagtcatagtcaggctgaaatcctgttatccggaaacagccggtcaaattgaacaatattatataggaaccggaaatgaaatctatacaggcatattgcgtcagtctatgcccacttttatagcgagtgtatttattctgttagccggtttttttatcacgtgttactgggtgtttattcacaacagcagccatatagacggaactcttttttatctggggatattctccatattgcttggactctgggccaccaatgagacagatgtttgttctctgatgctcctaaacagaagatcatctgcttttgctgcttttatgtttctgatgataatgcctatcccatttttgatgtttgtaaagagcttccttgagatcaatgatgataaaatctggaagatcttctgcaatctgtgtatgcttcagacagttgtctgcagcttgctgcactttaccggattctatgagtttcgaagaagcgtctggatcactcacctttccatttgtatagtgctgatttatctgatcacagttatcatatataaaattataaaaaaacaggctgatcagagactgaaagtctgcatggcagctcttgccttcgtcgtcattgcaactattgtggatattgccagttattacaaaacaagaaataattccggaatttggggaagattatctttccttgtatttattataatcctcggtttagagtccgcaagacaggctgtcgccagtttgaaaaaagggcgcaggatagaggaactcgaacaatttgcactgaatgattccatgacaggattttacaacagaaatgcctatgactactttatatataatgaaaagaatattaaaaattatatggtggtaacgtttgatcttaacaatctcaagatgtgcaacgacaactacggtcacagttcgggggatgcctatatcattcattctgcacatatcatagaaaccacttttgatcggtttggcaaatgttaccgtatcggaggcgacgaattctgctgcctcatcccggatgcggcagaattccagatagaacgttttatccaaaagatgcagcaggatattgcgatactcaataataaaaatatcattccaaccgaagttggaatcgcatgcggatatgcgttagccacaccggatgatgccgacatagaaaaagtgcgtgaacgtgcagatgagatgatgtaccataacaagaaagtgttaaagggacttatttaaaaaagatccagcatattatccagatatatctcctctctgacctgcagctgatactcaggttttgtcatataatagagcagaaactccagaatcagggcgctgccaagtcccctgccttcgattttaaaattggaaaatcccatcggcagatagctgtttttcatatcatccactccaataaacccgggattttccattgccttcgaaaaacgatagccattccctgcatccggagctgcacagcggtgatccgaaccattttctccaaggtttttgcggctgacagcttcataacagattttcctgtccccgcagccaaaccagcagcattcattacataagaattccactttgtctttctgtgcccctgtcaatgtacttaatttatcaaaaaccttattcaaccggaaatccggtacgacataaagaaactcttccctgtttacttcccttacgaactgctcaaaatccgtcagaaccttggtggtggatgaaacaaaataaaatcccggataattttttctcagatattccagcaacagatccgaatagagaatgacaccatttctgacaccctcacttttctcaaataaagtgcagagatgattgcatttcttatcccaaagatgttcctgcccaagcagggaattgctgaatgtaagccgcgctgagattccgtattcctgcatcaacgcaaaaatctcctgtgggtcgtgatccccgaacgaagtacggcctccaccccagatacaatctgacggggcaccatagacagagcctatctcacaccagtcgtaaaagtattctctgtgttcccggaataatggcagaaacacacgatataattcataaaactcaaacaaacccggaagatggtagtatgctgtgttcttttttaattgattcatgtctgtattctcacccctattaaatactagctatacatgctgtaaatcttatcattcatacagcatttcaatcagcactgaaaaattctagcatcatgaccgttgactggctcgtctggttttgctttatcacctaatattcctttttcttgaaaatacctacagtcaaaggaaaggacacgataaataacaatatagaacaaccaattaaaataaacggcccgaacaacggtatattaaaaagcattgtggcaatacccaatgcacaaatcaaagatatgataagaaacacaatggttttatcttcccccgctaaataaaccataggaataaatattgctcccattgtaagacttatactaattcctattacaagtacacctgagataccctcaaattgttcaaaagtaattccatgtaacagataggatagggctattataatgccaacgaaaagcactcctatcataatccataataattgatttatatataaactttttacaatatcaatccgctttactggcaaagtaagtttatattttccccattttgaggaaaattcatttccaataacggtagctgcatttactgctaatccgacaattccaataattatgaaatacatttgccatgtctggtctggaataatgataacggcaatccccattgcaaacataaaaagcaaaaaaatttttgcatttgtccatacagcaagaaaattgcttttaaaaagacctttcatacatgatccccccttactaaaagcaaaaaaatttcatcaacagaaacgtggtctatcacgatttctttgtactttctctgcattgctttacaatctgaaaccagaacatcaatttgaaaatcacgtttccgataaacaataatatctgccggatctaatgcaaggaattgattttccttgcagcgcataaccgcataattataaaccaaatcatttttcgatacggtcataatcagttttccgttatgaatgaatgtaatatagtctgccactttttctaaatcacttgtaatatgggaagaaagtaaaatagagtggtcttcttcctgtacgaaatcaaggaatgtatctaacatctcgtcgcgtacaacagggtcaagtccgccagtagcttcatccagaattaacagttgtggatggtgcgataaagcaaccgcaatcgctaatttcattgtcatccctctggaatattgcttaattttttgatttgcaggtaatttgtattcttttaaaaatttctgaaacaaaatattgtcccattgcttataaaatcctgacataactttcgctaattgtgctgctgtccaataagctggaaaattatctccgtcataaacaacacctattctttcccgcatatctgtatctgcgtctgtcatttcttttccaaacaactttaccattccgctgtctttggcgattgtatttagaatacagccaatcgttgtagtttttccggctccgttttccccgacaaaacccaaaatagaaccatacggcagagaaaaagtcacattttctaacgcaaaatttgacttagaaaatgttttggaaacctgttgtaattctaaaatattttccatgctcattcgtcctcctgatagaataaagccaacaactccgtcaatttttcaagggaaatattacttgtccgtccaatctctgcggcggcttgtaaatgttcctctgcaatacgttgttgttcttcttgataaaattctttgttttgtgccgatacaaaactccccctgccgacagttgtttcaataaaaccgtccctttgcagatcctcatatgctttttggacggtaatcacactaacatgaatagattttgccagtgaacgcattgagggaatagcgtctccggcttgcagttctccactcattatcattgcttttatctgcgatgtgatttgctcatatatcggcttgttggcgttattactgataatgatttccataactcaccgccttcgtttttttgattgtacttaatgtacagttacattatagcatctataaactcatagtcaaccctcaaaataaaattgccagatacagttatcaaaaatagctgtatctgacactcagaatagggggctgctgtctgtcgagctctgtgtgttactttaccgcacatgagcattgtagcaccggttctctccgcagatataaataaacgcgatgtatatcttcctgcaggaaaatgggtaaacataacagacggcacaacctatgagggttgtcagactattatagcagatgcaccgatcgaacatattccagtgtttgaacggatatagatataaacaaggaccaaaagttcatccaagaacttttggtccaattatttcatactcactcctcctcaaattctgcaagttctgtctccgtctcaagcatccgctctaacagactctcctggttcttttcctctgcgtcaagtgcattctgcagttccatcagcttcggatagtcactggcaagctccggatccatgaactgcatttttatttcagcgagtttttcttcgctctcctctaacattttttcatatttttctaactggtgctgcagtcttgaacggattttgcccggattgtaataagtttttttatcaaacacatccgttaaagtaggaacatctgcgtctgtttttatgccactctgatgctgattgtgtttctcattccccacagaattttgtgtatcatttcctgacacatacctcgcactctgtgacattcctcgcccttttccggaaatctctatctctttttgtttttctgcaagatactcctcatagctcatggtatattgtttcacaccactctcggaaaactccaaaatcccggttgcgatcctgctgataaaataacggtcatgtgagacgaaaagtactgttccctcgtactctcttaacatccgctctaatgcctcttttccaacaatatccatatggttcgtcggctcatctaagatcaaaagattcggtttggtctgcagcattttacagagtgcgagacggactttttctccgccggaaagctgtcccatcttcttttctacatcttctctggaaaataaaaatccccccagtgcactgcggacttcctccctcatataggaaggatattcctcccagaaattttcaagcacggtctgatcttcccggaaatgctcctgcactgctttctgctggtcaaaataactccattctacattttgtccaaatgaaaattcaccacctaacgcaggcagttcgccgactaaggttttcaaaagtgtggattttcctttaccgttctccccaatgattgcaagtctgtctttcttttgaagcagaaatgagactttacttaagacggtatcgtaaccgatctcaagatttttggcatgaatcacattcgtgtagctttccatgcgcggtacatatctcgcatgaaatgctttcgtatcaaaatgtctcggcttttcgatttttaccatgtgttcgatcgccatgcgctttgaacgtgtcgccgccactttcgtcggcgtatttttccatttttcgatccagtccgtcagacgtttgatctccttttgctgctcctcatagtctttttcctgtttgatcagtgcctcttctttttgcttcataaatgccgtgtaattgccggcataacgcttgatctcatgatattcgatctcgtaggtcacatcgatcactttgtctaaaaacatacggtcatgtgaaacaatgatgaccgccttatcataagtctttaaatatccttctaaccactcgattgtcggaagatccagatggttggtcggctcatcgagcagcatgatatctggacgttttaacagcagtttgataaatgccactttcgtctgctgtccaccggaaaaacttctgatcgggcgtttcagatcttctaacgcaaacccgaaccgctgaaacatagtctccatatcctgctgccacgaatatccccgcattgcctccatacggctttgtaagttgtcatattcgcgcaaaagctgtttgtccgcggaagttttcatttcattttcaagttcccgcatccgcttttcacacgcaaacaccggctcaaatactttcttgatttcctcttccacggtcacatctttttccgtaaaattaacctgacgcaggaaaccaatctcctgttttcctgccatcgtaataccacattcttcatcgctgtctaaattattcatcgaaatatcgcccgcgatcagacgcagcagcgtggtctttccacagccgtttcgtcctacaatggcgattttttctatatcatgcacctcaaaattgacatcacgtaaaatcacatctctgccaaactgcacgagggcatgactgatcttatatctcatgtttatctccattcctgcgtaaaatcttacttttacactaactcctctatctttgatagactacctaccttctaacaccagccgaagtaattcatttgcccagtactccgtcaattcaaagtgaggcacaggcagtagttattctctgctatttcaggatcatcttcatggccggtcttcccatagcccagcatcacaaaaccaatcaaaaggccatcatcatacatacatcccagacattttttgttgtaatttcttcaaaacgaatcatattaatcccctttcttgcgtgtgaaaaaatgtattttcacacaaatctccattcttttccctcacagcagccgaaatacctgctccgccgtggctgctatattttccattgcattttcttttttcattgcttcttctaatgttgtcacgcctcttacgatcgggaaaaatgcgtcaatccctgcctgattacagacggaagcttccggtgcaacactccctgcaaatgcaatgactttcgcattatatttttttgccagcgcagcaacaccgaccggtgctttccccataaccgtctgtgcatccagacgtccttctccggtcaccacaacatccgcatttttcattttttcttccagaccagttgcctgcaaaatcagttccacacccggtatcagttctcccgcaagatacgaaaggaacgcgtatccgagtcctcccgctgcaccagcgccctcacagtccgcaaagtcacaatccaaactttctttggtcacatccgcataatgtctcattgcttcatcgacctgctctttctgttcttccgtcacacctttttgtggtccaaatatgtaagttgcaccctgtttgccgcaaagcggatttttcacatcacaggcaatctgaaattttgcaccggaaagcagcggatttttattttcagtccggatcacctcaatctttacaagcgctgccgcgccctctcccacatcatttccatcttcatcaaaaaattcaaatccaagtgcctttaacattccgatgcctccatcgttggttgcacttccaccaattccaatcatgaaatttttacagccgcgtttcagggcatctgcaatcatctcccccactccataggtagatgcacgcaatggatctttttttgtcacaagcgtgattcctgcggcagatgccatttccatgacagccgattttgtctcttctaaaaaaccgtaataacacgacactttttctccaagcggtcctgccacggtaaccggtattttttttgctcccaaaccttcgatcagtgcatccacggttccttctccgccatccgcgagcggacttaaccatacttctgcatctggttttgctgccagaattcctttctttacagcatttccagcctccatggacgtcatgcttcccttaaatgaatcgattgctgctattactttcatataatcacatctttccgtgaaaatcacctgtgtcataaatataccggctgacttccactgtaaaattctcttcccctgccgtcaccttatcgtcagacgaaacaataatccgatctatgcctgtcattctaagaagtcagtttgttactgttcgcacttcatcccaagctgccagaacgctaccgcacttgctgccgccacgtttaacgaatccacgccatgtgtcatcgggatttttaccgtatagtcacagtctgcgatcgtatggtctgccagtccgtccccttccgttccaagaacgattgctaacttttcctccgccatcattttttcatcatctatactcacggagtcatcccgaagtgccattgccgccgttttatatccaagcttatgcagcacatccatcgcaccgtccggccagcatgcatttttatcaaaatatgtccacggtatctggaatactgttcccatgctgacacggcttgctctccggtacagcggatctgcacaggctggtgtcaaaagaactgcatccattccaagtgccgccgcagaacggaaaattgctccgacatttgttggatttaccacattttccaaaattgcaacacgccttgcattcttgcaaagctgctccaccgaagacagtgccggacggtacatggcacagagcatgccgcgtgtcagctgatatcctgtgatttttgcaagcatttcaacttctgccacataaaccgggattacatgctcatcctccctataaaccaaagactcctgtgtaagatctcggctttgtaatttatcacagcgcgcaaggatttcttttgcctgtgtctccacatgttttttttccatcaaaaatgacatcggcacacagccggcatctaaggcacgctcgatcaccttcggactttccgcaatgaaaatccccggcttcggctcaaaatagtgaaaaagctgtgcttcatttaaattgtaataaatctgcagctccggggcatccagatctttgatttctataatatttatcattgtgttcctcttttctctcctgtatcagcgcttgagcatatggcagataaattcattgattataccatgtgcaaaatggcacatgatcaaatttcaagccggaaaagaattcttccctcctcaagctctccccaacaatttaccggcggctccttcgtttctttaaatccacaatccgaatgtatttttattgatgataaattactttttcctataatgcaatctatcttttttgcgcctatgcctttcaaaaactccgttacatgacgtatcagttttttaccatatcctctgtttctatgccccggcatcgtctcaactgcctcaagaaaccatttccccggctctgactcaactgccctgagtccgcatacccactgtttttctgcggtttcaacaaacaccatctgctttggattttcgataaactcctttaaaaatgccgcatatgatgcctccatttcatcacgatctttaaattccctctccatatccgccatggattctgcatataataaaaacattttttttattacctgttcatttacattttcaatccgttctaacattttttatcctcctcttctgatcgccagattacaaaaacggtcggatcacagctttacagttccacgacacgcgttgaagctgttcggatttctccgtctgtcacaagcaattttgcataactgctgtgtattgatctgctgcacatttttcctctcataacctgcctgtccgatatttacctgctgcagaatcgtcttgatcagcgtcgattttccacatccgttttctccatgtaaaaagacacgctccccctgcaccagttcaaaggtcagatttttcaatacattgtcctctgcaccttcataccgcaccgaaagttcctggcaggaaatcagacgttccttatgataggaaagcggcataatttttaaactgacaggctgttcgatatcctgcaaaagaccctctttttcctgtatttcccgttccatccggcgttcgtactatgtcacgcggctctgcatcttttttgtcttcgcaccgatatatgctctcgttgcaaccgagcggtcatgctctttgacaggatcatagcctattttcgtcgcctcgtttttatctgcccactttcggcttcttgccgccgcctgttttaaagatgcgatttctttcaaatgtttttcattttcctccatcgcaaaatgatccatccgcgtcttgttttcccaccagcttgaaaaattgccgctctgtacctcgatcgtctttcggtttaaaaccagcacatgatcaatgcaggcatctaaaatatccctgtcatgcgatatcaggataaacccttttttcccgcgcagatttaaaaaagttgtttttccttttccatttctcccgatcagacctaacttccagtccgtatcaatcccaaaagatacgttttcaaaaaccgtatcaaaacttccctcataaccatatgtgagatctgttacctgaatctgtgacataaaaatctccattcttgcactgctttcaagcgcatctcaagtttgtgcgtaagcacaaatcttgcgtgtgaaaaatcttatttttcgcactatcctcctagttttgcggagcaaaatgcatgctatgtctcttatagcatttgcctcttgcaggagcagaggattttcctcccatacaaaaatcccatgctgccatgggatttttcttacacctcacatattttatgatcacatctggcagacaatagattgcacattgtaagataaaatcgattgtcccggacaacaaaatgtccgtttccgccattttttaacacaaaaaagagaggatacaagaatcaaatccacttttggcaacatgatatgcagtactgcacctctgcaatactgctgtaacttcagatttacacaacatatcatgcactttattccttataccggtgcaatatatgccatgtatcatcccgaatcaacagacaaacgtatgctatatatgacacacattctcttgctgactctgttttctttcatgtttcaaaagtaaattatctccgcattagttcctctcctttaaatttctattgcaatagtagcacaatgccatttttaatgcaaccaaaaatttttacgaaaaatctttcgttaccggtcacacaataaatatgcacagcagcaatctctactccacatttttgagtgcctgatccatcgggatctttttgatacgcataaagtccagtatcattacaaacagatatccgatcagcacaaatgcaaacattttcacatatccggctggctggatcacaaatgcaaaccatccactgtaactaaacaagatcgccttccatgccagattcataacaaacgttccaagtacaacactgaccgcatcttcgatcacaaccatgatcgttgtggaaagcagatacaggctggcgatttctttattctcatatccaagaatctttgtcattgaaattgcattctcatttttctcaatgatcagctttgtcagaagatagatcaaaactgctgaaagcaggatacaaagtatctggaaataatccatataagatcccatggaatgatctaactggtcacacatctttgtgatatcacgctcggtgatcaccgttgcaatatcatcttccgacagatctgctagctcttcatttgaaaaatatccactgaatgcctcttcatccagctcaaataccatgcggtaattttcaatcggcataaatactgcaatgtttacgcactggtcataaattccagctatcgtaaacgtatactgtttgttttcatatttttcatccagtgaaacggtatccccgacattaagttcatatttttctgaaaatgatctggaaatataaacttcatcttcctgcagggactgcataccttttatttctacatacttactatcgtctgaaataccgtaaacagagacttcctcatctattacatcgctttttttctgcaaagaacacatactgaatttttctgcgtctttattgtccgtcgtcagtacatttccatcttcatcctcaaaagatttcagaacatactgatactttgcaaacatcatattttttgcatttcctttgtaataagaaagcgtatccggcattcccactgccattgcaagcatcaccatgataaagaaaattcccacaaacagaatcagataatttgccacattctgaaacatgatgcgcagacggaatctgttaaaaaatttaaaatgtggcagccgcattgcttttttgcgttttgtttttttcagatcatgcctcagaaactgtaacggtgtatgctgcatcattttaataatgacgatcagattgaccataaacatcagcacgaccggtatcagggttgtcttaaaaaatgcatccggattccagatcgtctcataggtcggaaggctgtaactgttataatacatggataccacaacatctttaaataccgtatagccaagcacatttccgactaatgcggaaatcagggtaacgataaccggcatagacagataatggcgtaccagctcccctttcgtatagccggacgcacgcaatgttccgatcgcagatgactcttttgtgatcgtattgctgatcgtaactgcaaaaataaatgcgatgatgacaatcagaatatcaagcagcacacctcccattgcctcatcagagcccatgtcgtcggttgcaaaatgaatcgccggattcgcatattttggcacataatcttcaatctcattgtcatttaccacggtctgtgtgagcaacgcccgcataaaatcatccgactggtttttctcttctttttcatctgacggctcattttcatacttccatgcataatcgtaatgaatcgtcttatgtaactttgcaaatccctcatctgttaccattgcaacgttaaactttaaggcatcaaacatcagatccgtgcttttttcgtgcagtgtggaatagttgacatatgcgatcagaccaacgacctgatatttttcttctccgactgtgatctcatcgccgacttttatcccgacattgtcagcatgcatacggtcaatggcaatttcatcctctttttccgggaaacttccgtccatcaggcatgcaaaattgatatcatctgtctttgcaaaaacacggactgttccatccgaagttccgtcgttgtcatgatcttcctcttcatccctgtaaaaattttcatacagatgaaccggagtttccttaaaatcaggatcgttcaattcatatttttcttctgcatccgcatatttctcgttgatctcatctaaaaccttgttccaggcttcgtcgtatgctttctcatatgcctcgtcatgtacctcatcaaacgctttctcatacgcctcgtcatgtgccttaggatatgctttttcatatgctgtatcataggctttgttgtactgcccggactgttttgcctgtgccactgctgtatcaagcataactcccgcagttgtttcatcaagtccctgcgccatcagcatctgctttatctgtgcattaaaagaaacatcaaattctgactggaactctgcatcaaatttttccctaaattctatttcaaacttctcatcaaattcttttttgaacttttcttcaaattcactatcgaactttttatccagcttcttttttgcctcatcaatgtaatactgtctgacatctgctttatcgcctgtcttaattgcatcaagcagtgtttcgtctgctttcttttttaattcaaagtgtccgtcttccagcttgtatctgccaacaccctcatcagccgctgtcatcatgctctcgtttgcaacatacatgccggacacaaagccgatcatcagaatcaggaacagacttaccacaagatactttttccagtctcctgtcagttccctcggtattcgtctgataagcggatttttgttttttttctttttcatactaatctccattcttgcgctgtttttaagcgcatcacaagattgtgcgccagtacagcttcctaccactccagatctgccgctgaaattttatgttcattgatatcgttatgacgcactgccccgtcacggagtttgatgacatggtctgccatatgccggattgcctcgttatgtgtaaccatgataactgtattaccatatttgacattgacatcctcaatcagctttaatatttccttggaggtattgtaatcaagtgctccggtcggctcatcacagagcaggatatccggatttttcacaatggcacgaccgatggaaactctctgctgctgaccaccggaaagctggttcggcagtttgtgcctgtgctcataaagtcccagcgtatgtaataaatcgtcaatatcgagcggactgtctgataaatatgcaccgacctcaatattttccttgacatttaaatttgcgatcaggttatacatctgaaatacataacctaaatgttttctgcggtactgtgtcagcttcttctctccgagttcttctaacttatcgccgttgatggagatataaccggagtccgcactatcgattccaccgataatattgagaagcgtcgactttccggaaccggatggtccaagcagcacacaaaattctccttttgccacggaaaaattcattccccgaagtacttcctgtcgggtctccccgcttccaaacccttttttcagatcaacaatttccaaaaattttctttcttcttctgacatatgttcccctttcccattgcagaattgttcttacatccttatctattctgaatggtgttaaagtcttttcttacttttgttagtgttatctaacttttgtttgtattatatcacagcttttccagattacaagcaaaaagacgattccttttgtcagaatcgtctttttgccttatataatgtctttactgtctgtttcactgtaaatattgttctatttgtctgacagattttcctgttatatctgccattttctctatggaataaccatgctgcttcatattgtaaatcatttctgctagagtttcttctctgccgattttgattccttcactttttccaatctcgatcccatcacttttaccagcttcatattctgcctttcggagcttcttttcttcccactctttatcatactctaatatacttaccatctttacctccgagcgattcttccgcaagaaatcgactaagattccttctttgatgcattccgtgattgccctttcaactgcatcattcaaattctgcgctgatgcatattttcggactctcgcaacataaatggcatattccttcaatgtctgacactgttccatcaggtctttgttgtgtccttcgttcacattcagcatcagaacttttaactctaaatccggctctccagccagatgctcatatgctgatgaaagtttcagttccatacggtcttctacgtcatcggttccattgtaaaacaccataaacttcggtgccggaatcttctgcaactttgacgaatacagtgacttatcattcagatactgctgatactcgattccaatatagatcagatcccgcaatggtatattgggattgatcgtcgactgatgctcatagagataaatattcgtctctaacataaatgccagatcatttttcattcccatatagattgcgttttccaacgtgacgatcttaagggcttccgcattctgataatggcttccggtcactgcgttgtacagggataagagattttctttctctgaaaacagcatgcggaatacagtgtctttgtactgacggttggctgtcggcgtcttttctgatacctgctcactcttcttcatattcagttcctcctgtgtgcaggaggctcatccagatctcctgcttttcatttctgtggataaaaagcatagatttctgaaatgtttttttgaattttagacggatatatacatcctgatagtcatacagacagaattgccggattcgtaattatagcaccggatagatgtctgcatcgtagaaatatgctttgagttattttatcatacgtcatccttagtatgcaaccaatttgaaatttcttgtgcaggttgtacaaaaacaaagttactgttcacaggttaccctgcggactgtaacttcgcagccccatgtaaagttttgcttcgcaaaaggggctgctcacccccacatcacgttcatacgcacctgaacagcaaagtgttcaggtgccgagtgaacagtaacaaaacaagctgctatttttaaagaaagacagtgtccggctgaatatcaatccggacactgtcttccctgtcattttctgacagttacacactttaaatttttctatttactgaccttaacttttttcatggatgaatgttttccatacacttttttgcccgtggaatccattttataagcccggatgcgcacatagtatatctttccttttttcagtttacttatggtataggatgtcttcgccgtgtttttctttgtgaccgcctttttgaattttttatccgtactgtaagaaatctcgtaaccttttgcgccggatactttcttatatttcagtaagatctgtttactcttgctgtttttcgcagacgtaagagaagccttcgccacttttacttttgtccactttgcatacaaaatgtaatcggattttgcgctgctgctgatacttgtgatcttctttttaaattttgcatccgtataccagcctgcaaatgcgtatcctttgcg

SEQ ID NO: 5254 - DNA, 1272 bp, Unknown
  gut microbiota DNA sequence
gatgcctgataactactgttttcagacgaagtcaccgtgatctttgttctgcccggtgcctttgctgtcacactgccgttggcatccacggtggcaatctttgtatttgccgatttccagactacctttttgttggacgcataagacggtgatacagttacatttaaggtgagcttctctcctctttttacctctgctgatgtcctgtctaaagttattcctgttactttcgcctttccggtgacagtcacatagcagactgcatattcatcactgccgtccgttgccgcagcccggatttttgcttcaccctccgattttgcagtgacaagtccgcttgcagaaacctctgccactttcgtatcagaagaagtatatttgagttttttatttgtggcatccgaaggtgaaatatatggtttcaactgataggtttcaccagctttcaattcgatctcatcctcatcaaattcgatccagtctatcagctgcggtacggttattttacagactgcttttacatttccagccgttaccgtaatgactgctgttccaacaccacagatctccacatatccggtatccgaaacagcagcaacctcttcattggaacttgtccataccactgcatctgtgaaattcaaaggtgcgatcgtcgctgtcagttggaaatcgtcatagtgctccgccgttttttctgtaatatccagactgactgaggttgcatgaatatcctgtgtgacgtacttgattccttttccgcttgcataggtctcggcataacagtcggacggaccgtacatcgtcattttctttggataagaaaatgcatttgatgcgatcgaagttgtgttgcgcgggactgtgatctgcgtcagcttcgtgcaattgacaaatgcactgtcaccgatcgtggtcacattgtaagggatcacgatggatggcagaactatacagccgtagaatgtctggctctcaattttctttaatttgctgcctaatgtaatatcggtcagggcttcacatccataaaatgcagaacttccaatagacgaaacggtatccggtaccgctgcctttttcatggctttacagtttttaaatgcgttgctttctattttttccaccccggatggaagtattgcttccggcaaagattcacagccggaaaacgcggagttcccgatcgtggtcagggtggatggaaaattgatggtggttaactttttgcagccggaaaaagtgcttgctggtatttctttaaggatattt

SEQ ID NO: 5255 - DNA, 2114 bp, Unknown
  gut microbiota DNA sequence
ccgactaagaatccgattgccttttctttgccgttatggtaatcctctacggactgcgggttatctgccagtactttctgtaccgtttcgcggagtgctccctcatcattgacagtctttaaacctttttcctcaacgtatttttcaggatcgatgtcgtctttaaagatccgttcaaatacttcttttgcaaccgtgttcgtgatggaaccggaatcggcaagattgatcagttttgcaagattgaccggagaaaaacggatgtcttccggatccatgttgttttcctttaacagacgcatagtttcgaccatgatccagttggacacttttttcggtttgccgcaaagctcggttgccgcctcaaacaggtctgcaaattttttgtgtcctgtgatgatctcggcatcgtattttggaagatcaaactctctctggtaacgctctaatttttccgtgcgcagttccggctggtttgcctttacttttgcgatccactcatcgctgatcacgatcgggacgagatccggctccgggaaataacggtaatcctgtgcatcctctttggaacgcattgcatgggaagattccttattgtcatcccagcggcgtgtctcctgcacgatcttctttccggcttcaagcagttcgatctgacgtgcacgctctccctcgatagctcttgcgatcgctttaaaggagtttaagtttttcatctcggtacgggttccaaacttctttgcgccggcttcacggacggacaggttgacatcggcacgcatggaaccttcgtttaatttacagtcagatgctcccagatactggatgatcatgcgcagcttttcaagatatgcgataacctcctccgcggaacgcatatcaggctcggatacgatctcaatcagcggtacaccggaacggttgtaatctacgatggagacatcctcccactcgtcatgcaccagttttccggcatcctcctccatatggatctcatggataccaataatcttctttccggctgccgtctcgatctcgacaccaccgtttctgcagatgggcagatataactgggagatctggtagttctgcgggttatccgggtaaaaatagtttttacggtcaaatttacagtactgggtaatactgcagtttgtggcaattcccactgccatcgcatattccaccacctgacggttcaacaccggaagggaacccggcataccggtacagaccggacaggtatgtgtgtttggtgcaccgccgaatgccgtggaacagccgcagaagatttttgttttcgttgctaactcaacatggacctcaagtccaatgacagtttcatatattttactcatgtctattcctccattttcggactatgcaagcgggctgtgctcataggttcttgtctgttcaaatgcatatgccgcgcggatgatcttcttctcttcaaaacagtttccaataagctgtaacccgatcggcagaccgtttttatctttgccgcacggcagtgaaattcccggtaaaccggcaagatttacggaaatcgtgtaaatatctcctaaatacatcttgatcggatcacttaaagactgtcctaattttggtgcagtggtcggtgctgccggtcctaaaatgacatcatatttttcaaatgctttatcaaatgcctgtttgatcagtgccttggtgcggagtgctttcagataatatgcatcgtaataaccgctgctcagcacgaaagagccaagcatgatacggcgttttacctccggcccgaatccttcagaacgggactttttgtacatgttgtgaagtccctcgtattctttggtgcggtaaccatatttgacaccgtcaaatcttgccaggttggaacttgcctctgcacaggcgataacataatatgcagggatcgcatattctaccaggcttaaatcaaactcttccacgatggcgccctttttctttaattcctctgcagcctgcaaaactgctgcttttacttccggatctaaaccctccccgaaataatcacgcggaataccgatcttcattcctgcaacatcatccaccagtgcactggtaaaatcgtaatcttctctttt

SEQ ID NO: 5256 - DNA, 9807 bp, Unknown
  gut microbiota DNA sequence
tcgtctctaaaatcgttgcacagtctgtcacatcttttgcgaccggtccgatctgatctaaggatgaaccgtaagcgatcagtccgtaacgtgataccgttccgtaggtcggcttgattccggtcacgccgcagaaggaactcggctgacggatggaaccgccggtatctgatccaagtgcaaagacacattcttctgccgcaaccgctgcacaggaaccacccgaagaaccgcccggcacatgctctgtgttccatggattttttgtctcaccgtaagcggacgtctctgtcgtgcttcccatggcaaactcatccatgttggtctttcctaaaataactgcccctgctttttccagatttaaaactgcctccgccgtgtaggtcggaataaagttatataaaatcttagaagaacaggtggtaagcagatctttcgtacacatattgtctttgatggcaaccggtacacctgcaagcggccccgtcagtgtgccgtcatcaatctgtttctgtacttcctttgcgcgtttcagtgctccctctctatctactgtcacaaagctgtttacgagtttttcttttttctcaatcgcgtcaagcgccgccgtaacagcttcctctactgagatttcttttgcttttattcttttgccgagttccacggcagtcaaactcataatattcatataaatctccattcctgctcctgctttttatccgaacattttctttgcctgctgcacaaaatgttctttgagcaatctgattaatctccaattgtctttggcactttaaatccaccgtctttctgtgccggtgcattcgaaagcgtctctttgctgccgtctccgtttgtcactacatcttccctgaatacattgtttaccgggaacacatgtgacatcggctccactcctgtggtgtcaagttcatttaatttatcaatatagttgagcatttcttccatatctttctttgcatgttctttctcttcctcattcagctctaattttgcaaggattccgacatactcgatcgtctcgtctgagatctcatttttgcgtcctgttttaatgactttcggttcttcctcttcgatctccggttctagggtttcctccggctcttcaacaacaaccggtccaacaaccagaccatagcaggcaacatcccctgccccggagttgttccactctgcctggatcgcagttccttcatattttaatccacatttttccatcactttcgcagagtatggatttctggtatcacatctcgcctggatcctgcgtgcgccgacttcattggtcaggtattccacaacggctgaaagcgcctcggacatgattcccttatgccagtaatcgcagcttaaacaatagccgacttccatggactgtactttttcattgaccatcaccacaccgatgctgccgattgcctcaccgatctcttttaattcgatacaccattcatatttttccggtttctcataggcggcaatccagcctttcaaaataccttttgtctcctcttcgctctcgtgtgccggccacagcagatatcttgtcacttccgggtcagatgcccagttgcggtacatcggctctgcatcggaaagtgtaaattttcttaaaacaagacgtcttgtctcgattgtttttgttcccaaatgtttcacggctgttctcctttttcattcatatgatgtctgtttgcaaaactccattttacattcaaaatattttggatttacggctctaatctgcttaaatcacgcgggaacagcgtcgtctcacggacgttgtcctcaccgactaatttcatggtcagacgctctaaaccgattccaagtccaccatgtggtggcatgccatgtttgaatacggataaatactgttccattccctcagactccataccacgcttttcgattttttccatcagtttgttgtaatcgtggatacgctgtccaccggtcgtgatctcaagtccctgatataagaggtcaaaacttaaggtataagtcggatctgccggatcgtccatcgcgtaaaacggacgtttcttggatggataatgtgtaacaaatacgaaatccgcatcatactcttctttgaaatactgtccgatgagtgcttcctcctccggctcaagatcgtatgggtttctgatctggcggtgatatttttctgccactttttcttttgcttcatcgaaacgcacggtcggaattttgtcgacgttcggcagtgtgacgcctaataaccggagttcctctgcataatcttttttgagcagtgcgatcatatactgcaaaaatccggtctccatcgccatgatatcttcaaatccatcaatatatcccatctcaaaatcaaggctggtgtactcgttcaagtgacgtttggtattatgtttttctgcacggaataccggcgccgtctcaaatacccggtcaaatacgccgaccatcatctgtttgtaaaactgaggactctgctgtaaaactgccggtctgtgaaaatattccaaccggaacaggtttgccccgccctctgcactttttgcaccgatctttggtgtatggatctctgtaaacccctgactgtataagaaatcacgaaatccccgtaccacaccttcctgaatacggaattttgcacgctccctgatatttcgaagggcgatcgcacggttgtttaaattcgcctccaaggaggtatttaatttccattttgagattgcaagcggcatcggtgcagccggttcggacaataccttgattttatccagacggatctcaaatccgtgtggtgcacgttcctccggttttacggttccctccacctcaatcgttgctgcctcttttaaatcttttaagtcaaactgtgtttttccttcttcgtaaacacactggagcagtccttctctctttcttaagacgataaatgcaacttcacccatatcacggatggtatgcactgctccgtttacttttacactttttccctcatagctgccggtcagtaaatcaccgatctctaaggtttcctttttgtttacacctgtcatgaattccatattctgtacactcctttagatatgataaggtgcgggacgggaacctttttgaaaaacaaaactctgtctttcagattttcaacaaataatagaatgcacgctccgcgaacattctattatcatgaatacaaaaaaccccggaaaagcatatgcttttccggggcgaaatctcttagtatcccgcggtaccacccgcattgaaaaatgatgtcgttctcatcatctttccgctctctgtgcttaacgcgcacccacgtactgacctactttcgatccactgccgctgtttttaagatcaaccgctcgtgcaaattcctgttcaatcagtctgctccagagtgttcccttgaccttctctttcaaacagcgctctcagtcggtgacgctgtattcctgtcgacgcccaaagatcagagtctctttcatcgctttactgttttaacgttgtaacatttataccacattgatttcctgtttgcaatattttttttacaactttttttattttacagtaattttgcaggctgctttctttccacttgcagtttttacagtaatcgtggctgttccttttttcagtgccttgactttaccattcttatcaactgttgccacttttttgttggaactcgtccaggtaagtttatctgttgaggaagaaggtgtcatagtcgcttttaaggtcagagtcctgccctttgcaacagtcgccttggttttgtttaattttaccttggttgccggtacttttaccgtcactttacaggttgctttctttccacctgatgtctttgcggtaatcgttacagtacctttctttacagccgttacaacaccatttttatcgactgtagctactttcttgttagaactgctccatgtcactttgtccgttgcattcttatcaagagtagctttcagctgttttgttgcattttgctttaatgtcagtttctttgcactcagtttaatacctgctgacttcttattactctttacaacggtcactttacaggttgctttctttccacttgttgttttaactgtaatcgtagctgttcctgttttgactcctttgatcttaccgctctttgttactgtcactacctttttgtttgatgtagaccatgtaagtttatctgtcgctgtcttcggaaatacagatgctgtcagttttacggaacttccctttttgatactcatcgccggtgtcagatatactttggttgccggatctgtaaccgtgatcttacaggttgcctttaaaccattctttgtggcagctgtaattgtagcggttcctgctttctttgcagttacttttccgtttgcatctacttttacaacagaggatttggaagatttccatttcacggctttatccgtacaatccttcggagtgactgttgcctttaaggtatatgtttttccttttttcaggctgagttttgtcttgtttaatttgatcttcgctgcctgtacctgatctcctacagttactttacattctgatgtaaacagtccgtcttttgttgtcacggtaattgttgcagttcctttggcatttgcagttacattaccatctttgtcaactgaagcaactgttttgtcagaagtcttgtattttactgctgtgtttgttgcattctgcggtgctactactacatttttagaaatgtttgctgttttacctttctgtaaggtgatctctgtctttttcagtgaaactcctgttactttgactgcacgttcttctgccttaatcttatatgcaggatcaaaaccaggttttaagttttcttcatccacagaaacctgttttacatgacccttgtctgttaagatcacaccattgtatgccggaacagttaccgtcacgctgcctcctgcagcactgtaactattacctgcgatcacatctgcaagttctgctgcattaattccaagttctgcaacatttactgtcacagacttgtctgctgcactgttgttcatcaaaacaagcatgatatccgaatcatcacttctgacatagcctaaaatttctttatctgtgccatataccggctctacggagcctgttctcaatgcactgtaactgcttcttattgcagcaagttttgcataccattttaccagattctcatttccttcgccccagatcatcgcacggcggtcatctggatcatctgcacctaccataccaagctcatcaccatagtagatcgtcggtgcacctgcataggtaaactgcattaacgcaactaaatactgtttctgttttgctgcatctgaagtattctcgtaagtcgggaatgcctctgcaatttctttctggtttctatcgtcatcaataccatctaagtaagataacaaacgtgttgtatcatgagagtcaacaaggttcatcatcgcataaaatgcttctttcggataacgctctctcaaacgctccagcgtatttaacgcattttttgaatctccgccttttgcataggcgattgctgctccacggaacatatagttcataacagagtcatacatgtcacccatcagatatttgactgcatccgtccagatctctccgatgatcacgttatcactgtcaagtgcctttacggatttacggaaatgctgccaggtctcatccgatacttcattggcaacatcgagtctccatccgtccattccttttgacagccagtactgtgttacactgttatctgcggtcttacttgtctcattttttccgattacttcttctgcccaggtaccggtctgatattcggaaccgttcgttgccttgatgatcggcatggagtcataaccccaccatccatcataaccatatactggttttccggcacgaagtcctacggaatcacatacttcatcgtcattgtcatcttttaaagttgtatcggaaaatacatcaaaccattctgtatagtcatagtttgtaattccatactctgccgtaaaatattcttttgcctgtttttctgcttcctctttggaaatctttttctcgctcatggcatcgtatacatatgcccagtaaggataagctccgatcgtatcggttccatcttccagatactcatagtaacggtcaaaataaacagaatcatccgatacatgattgaatacaccatccaatacaacatgcatattattcgcttctgctacgctgaccagttcctcaaaatctccaagtgttccaaggatcggatcaatatttttatagtcgcttgtatcatatctgtggctggaaatagattcaaataccggatttaagtagatcacggtaacaccaagtgcttttaagtaatcgatccgttttgtaataccctttaaatctccaccatagatctcattgctccagtttccatcgcccttatatgcgtaagtcggataggtatccggatgtaatgtgatctgctccgggttctccggtaaaatataccagtcattcatatactcatactgtaccgtacctcttgcatccgaagtgatggtatcgtttgtcacatcgccattatagaaacgatccgggaagatctggtagatcactgcatttttcatccagtcgggtgtcttataacctgactgatatacgatctgatcatatggtaaaagatttaacagattggctgccacaccggccccataaaatccgtcatcatcgccatacattaccactgcagtttcattgtatactgcaaagaaatactgatattctccaagtctgtcatagcttgtagtaacagaccatctctgttttccatcttccgcaccctctgcttttttcatggaaagtgttttctttgccacgccttttacgaccagtttgactgcagtaacttcatctccggtatcgatggagtaggtaacttcctctccggttgccaccgcaccgtatactgatttgtaagctgtatccttagaatcaaatacaagtttgtttgttgcaacttctttgtcagaagcattcgaataataaatgcctgattccggatcataatagaatgtaacatcctttgtggtatctaccgtatatggatccatttcaacagtctcatcctctgatacgatcttcgtatcggaataagtaccagcttccatgtttgccacagttgcgctgtaaattccggtcaatctgctgtcagaaaatcttgtatctgccagaattcctgttccctgcaataacaggcttgccccaaatttataatcaatactgcattttgaataatggctgaagtccgaataataaatcgtaacatcctgaggttctgtcacggtaactgcaatattcgatccacttgcagcaccgcctgcaccatagctttctctccagttacccatcgcaatcttgtactcgtaatttgccgccggaacatttttaaatgtataggaatataacccctctcccatgtatgtcattatatttgatgctgcatcccagctttttccaggaaatgtacccggtacacagaccattctgccggtaaatttatctctggaataagaaagataagtatcttttccaactgtaacaccagcggatgtttcaatgtctttttttacaccatctacttcgatgtaatatacgatgtccaatgcatcatctccaaggaaaatcgcatccgtggtatatgcatttgcaacacttttatctgctgtcatggtaaccgtctttaatgcagaagttcctttttcctccacctctgattttttaccataaacaacctttactttatcttttacgttttctgcaacagccgtgaatgtggtagttccatctgcattgtcgactgcctggtccgatacctcttttgtggaagcaagtgtaattgttccatctttatccatgtaccagttccaggtgccgtctttctggatataatatacatcggttggcgtttctgctacaaatttatccaacagtttgtcgtaagtattgtcacctgtttttgtatcatccgcattatctgcatctacaaactgaaagcctccgaatgttcctttgacagtgagtttgtaaaatccattctcttctgctgtgaaaagatctccttttacgtcccagccggtgatcgttttctgaccttttgtatcagtgatagtcaatttgtcattccagtgctgcattgccggctttgaccatttcgtttccggtttgatatgcatggtaaggtaaacaagttccggctcttttaaggcttctgtgcctgctgcatctaaataccagccccagttaccgtctttgcagatgtaatagagatctgtcggagtgtcaccagtatatgatgtcatagtgctgacaaatccctgtcctgctgtgttctttgacggatctgcataatctaaaaactggaatcccgtaaaattaccgtttaatgttacactgtaaaattttccgtctttatccgctgtcagaagctgtcctactgcgtcttcccaacctgtaatctcctggtttttttccgttgcaccagatacgattgtgttatcatctccccagaactgaagtgcaggcgttttgtactttgcagaactgttatccatgtgcagtgtcaggttcattgctccttccacagctttcacttcctgctctgtttccgtttcttctgtttcctcggataattcagtctcatcttccgttgtttctgttacaggtgcctctgtttctgcatcttgggtctctgcttctgttactgctgcttccgcatcctctgtttctgcatcttcgttctctgcttctgcatcttgggtctctgtttccggctctttcgtttcctgactctgacttgtaccagtttcttcttgtaccgcggtatctgctttcgtctctgtttccccggttttttctgtcacagcattttttgtttcttccatacgatctgcatcgctggattcttcatgtaccgtttcttctgtccccgtttcaagctccgccgccgctgcagatatggctcccggcgtctctggtaacgttaccagcatacctaaaattaaaagccagctaagtgatttcttagcggccttctgtaaaatctttttgtttctcatttttcaaagtcccccattttcgattttcgatcatacccccagtttgccggataagatcattaaccggtcttatacatgtccctctcccccctctttcaaattttcgtattttttcgtacttctatatcttatatttattcgttgatttatacaagttattttcgtattttaattctattttcgtctgtttgaccaattttgcaaattgatttttatgaattattcggatattgactttaggcgaaaatatgcgaaaatattttttctgttacttttgggcaataaaaaaacagtgtctcctgttctgaccgattccaccctttcattgtcagattttggtctgactgactttcgtggcagatacggacagatatcatcgacactgtctttctcaatatttttttatcagatctgccctgtttctttcaagtatgcgagcagtccctcacaaccgcaaacaacatcccggtaggtctcgtcaaacctgccggaataccatggatctgaaatggattttccttttcttttgggatccgtagcaaggtccaaaagcagttttatcttgccatcgacatccggtcccgtgatgcgtatggtgtttttgatgttgtttgcatctgcacagagcagatagtcataatacccgtaa

SEQ ID NO: 5257 - DNA, 748 bp, Unknown
  gut microbiota DNA sequence
tttatccgcattaaaaaaggacgcagaatctctcccacgtcctcaaatctatctggctttatcttcccttaccttcgaaacttccttatatgccgcttcctgcttcacctcatccgcatctctagcctcaaatgcatctgcattatactgatactcctgcggctcagcgaccatcggtgaatatacaacctctgcttctactcgctcagcttctgccctctccggctctgtctgttcctgtgctttcgcattctccatatgcttttccttatcaagctgcacattcatagccagattatccagcttatcaatagatgcatccaaatgaagttccattgatacaagcatctttttcactgctttcatcggagcaagtactgcctttgtaatgggatgtttctgctctttctgagaataatccacctccggcttgtcagcaaaagtgcggaatgcattggctactgtctgccctgcttcacgaaatccttttgcaagaagtgctgtctttgctatatccttatctgtggtcttgattgcacctcttacattctctcgaatatccagaaatcttttcttaattcctaagaactcagataccctgtataatgcagctcttcccttttcctttgcttcttcgactatgcccttagcagtagatttgacctgttctttcacttctaatacctgtgactttatctgctcacatctggtattaagtcgctcctgtgcttctgacaatgcctttttt

SEQ ID NO: 5258 - DNA, 1172 bp, Unknown
  gut microbiota DNA sequence
ctgccaagagcctgtcagccccatcacggtcttctcctctttctttcgtgactgttacgttttatccccgtcaatggggctttctgaaagtcctgcatttcatacttccgcccgcacaagtccatttagttatcaaggttcaacaaagatcaataaagggaaacatctgttcagattgaacttttcttagaaatgccgtagaataaattcgttagtttttttgcggcatttcttatgaaatgtttcccggaagccttgtgattgccgtcacagggcttctttttttctggttcccgtttccaggaaccgattgtctgcattgctttgatgctacggtcatggatctgccgtgcagacaggttgttatttcttgttcatgttttttaaatgctcttttaacactgtcatatttgttttacaatctgcaaaatgacgatatccagaatcaagaagataatattcttctgtttcattctcttttttactccattctgaataataaggataattctttaccacgattacatagccatccggcagatcatagcgataaaatgtttcttctgtgcactcatttctacaccaaatgttccaggacttataactgtttataaactcttctctctgcgccatgttcttcatgacaggaagttccggctgtgttataacagattctttatcttcgatccatccgcatcttccattgcagtctatctcacagtcagcacagcattctactgtttcgccacagccacagcacacacaggttccgcttggacttttaccagtaatgcagcctctctcatacggcggtacctttttctccggcgttggttgcgacgtcgcaacagactttttctttttcgatgtctgctcttttaacgactttttataatttctgatctgcgatactgtcatatcagaagtaactctgcggcgttcctgttcctttaacggaagcatttctactaactgagagtaggaatatttttcatatctgtcatcgatccacatctttctggaatccgcatcatcttttgaacaaaattcattccataccgagatcacacgcgatactgcagatttatccatatgaaagttcttttcaatacactcatagaaattgtcgtatcctaattcttcatggtatccgcacagctccatctcatgaa

SEQ ID NO: 5259 - DNA, 910 bp, Unknown
  gut microbiota DNA sequence
gtaaggacaaaattgtaaacagttctattgcaagtctgaaaaaaacagacggtgcaacacagatagaagcagcatatcttgtctgggaaacatccgtacagggaaaaaataatacggatcttgtaaaaaaggctgcgaataaagcggtttattttgccggttcaacagacaagggtgcttttacaaagaaagtaaatgcttcctatgctgcagttgatatgcgtgaaccacatcttggaacaaaagaatatacattttcctgtatgtatgtagatgtaacctcggttgttcagaaatatggctatggtaaatacggtgttgcaaatatcccttatgcagcgtcaatgaaaacaagtaatacagacaagggtacacatgcaggtgagagcagttccgcatggcagctgatcgtaatcgagaaaaacagcaaagcaaatgtcagggctgtttctttaaaaattggatctcattttaattatcagtgggaaggcagtacatggacaaaaaaccctgtatccatgaatctgaatcttggagattgtaagacaaatcagtatataaatgaagattccgaagtaagcggagaattattactgcttggaaccaattcaggaattgtgaaaagcaacgcgacagaacagaagtcttttggacttgagttatatgatcgggttaataaagacaagaataaaaatgacaagttggcatattcaaacagtggactgatcggacattcttatttctatcatggagacacacagctgagttctaagttatcttctgtccgtggtatattaacagatttcagcatgaataaggatgatggtgcacatccgggatttgcaacaaataaattccgtgcggaagcatccgattcatcctggtcgacattatttgttgtcgggcttgc

SEQ ID NO: 5260 - DNA, 657 bp, Unknown
  gut microbiota DNA sequence
tgtggaatcgttgaaaagtcagaatatgaatggcagtaaaatggaatggaggaataatatgcagttaacaggtgcccagatcgtgatcgaatgcctgaaagaacagggtgtcgatacagtttttggttatccgggcggtgccattttaaatgtatatgatgaattatataaacatcagggagaaatccgtcatgtgttaacttcccacgagcagggagcatcccatgcagcggacggatatgcgcgaagtaccggaaaagtcggtgtgtgtttcgcaacatcaggaccaggcgcaacgaaccttgtaactggaatcgcaaccgcttatatggattcggttccggtcgttgcaattacctgcaacgttaccgtaccgcttcttggaaaagacagttttcaggaaatcgatattgcgggaatcacaatgccgatcacaaagcataactttattgtaaaggatgtaacaaaacttgctgatacgatcagacgtgcatttaagatcgcacagacaggacgtccgggtccggttttagtggatatcccgaaagatatcacagcggcaaagacggaatatacttcggtgaaaccaaaaccgatcgcaaggattacagatacaatcagtgaggaagatgttgatatcgcagtttccatgatcaa

SEQ ID NO: 5261 - DNA, 1731 bp, Unknown
  gut microbiota DNA sequence
agagtgttggaatgacaaataaatcactttgcaggatgttatatagtgaaagtattttttgcgttctaaatgcacttgttccgggagttatacttggaattgcaattccatttttaattaatttatccattcggaaggctttcccggtattgtatcatattccgtgggcggcattatttgggggtatatttgttttgataggaattgtgttttttatcacacgaactgaaattcacaagttaagagataaaagtattattgatgaaataagaatggatattgtataaatgtcaatgctgttgtgttcccttatcagagttcgtaaatccatatgggaagatataacataaggaggaacgaaatgtcatataaattagtaattgctgagaaaccctcggtggcgcagtccatcgcaaaggtaatcggtgcagataagagagaggacggatacctggagggcaatggttatattgtcggctttgtgcggaccggagtggtaacggagacagtggagaggaaaggaatcggaacctccgcaaccagggcagcaacgattgagaagctggtccgtatgaacgaaatcgaaggtatgatcacggaactggtcagaacttataagatcattgaagatgcagaagtgctcatgcatccggtactggaagaaatcggagtatgtccttgctgtgtgtgaaactttgtctgtaaatagctaataacagcaaggccttctatggtaaaatataaatcatgccatccattattccgtacgagataatggagtaatcagaaaactggctgcctacgtcattcttggcatcaacacagaagggaaaaaagaggttctttcaatcactgtcggtgataatgaaagttcaaaatactggctgtccgtcctgaatgagctgaagaaaaggctagactggctctggatcgtgttactgaaaaatggaccgcaaaatacccgaattctatgaaacgctggtatgataactgggatgcaataacgccgattttcaagttctcaccggatgtcagaaaggttatttacacgacaaatggtatcgaaagtctgaattctacctaccgtaagctcaaccgtcagagaagcgtatttccaagtgatacagcgctcctgaaagccctgtatctggcaactttcgaagccactaaaaaatggactatgagcattcggaactggggacaggtctacggcgaactcagcattatgtatgagggacgactcccagaataacagaatctatatgcatgatgagaaggacgtttgacgtctgctcttgacatgcccgaaatcatggcgtatatatatagtaagagctggaagcttcaatttagcgcttccagctcaatcattatcatagaagattattatttacagacctttcttcatagtctctaaattttagctatgcaccttgaaaattcaatatctggcagttattcagttgtcaatgttcagcctttatgcagcctgcagtcgtattttcatcatagtaggaagtgcatccataaatgcattcgccaattcattgattttttcgtctgaaagttcagtgttatctgaaagcattgttctgaacatttgaagcagcatttgaaaagcctgtatccatgtgatatcagacattttgtcagaaaagtataaaaagagctccccaagtgaccggttatcattgggttcccttttccatagacagctttcaaggctgagga

SEQ ID NO: 5262 - DNA, 553 bp, Unknown
  gut microbiota DNA sequence
ataaaaccaaaaccacatatgctctgttaacgtatcgtaactgtatattttttagcttccttaaggaggcttatttctggtgtcataatacaggactgaattataaattctatgtgtttctatgtgtacacgctatcctattacaaatagagtgtcagaattaaaagtccatatagagctgacgcgctttgttcaaccagaaaaaatcgaaattgatgcaaacgaaagggcagttagtgaaaaatcccaatactgctttttcgtttgcaccaccttcgattctttccttaacgatttataaaacacattcattttacataggcacagtataccacagttcctgtgcctatgcgataacatttactgtttcatccgataagaactcatcctctctgccagacaacggaatgcacaccctgcaaatcatgccctttccattccataaaaaagcccccacatgctccttatcgaacacgcagggactttcctgtcatattttaagttctgttatccttgcacacagaggtgcggaataatctattcttctttcttc

SEQ ID NO: 5263 - DNA, 4579 bp, Unknown
  gut microbiota DNA sequence
tttcgcggaagggacaccggcagtctgccggacggtgcatattttccagacaacagctccgcgattgcttttcctcccatcggtcccggataaaaagcatataacagtgcatctgaatcctgcgcaatttcagggattgcataaggccgcccggcaatgactacggagatcaccggttttttcagcgcacagacagccgtaaacagttcgttctggttcccggggagctgtaatctggcggtatccatgccctccccacagtccatctcaagtactccctgtacttttgccgcaccgttttcatcgaacagcgcccctttaaaacgactcgatgatccgcctaatgccagcacgataatatccgcattttccgcaagagaaacagccgtcccgacctcatgtccattataacagcgaacccggtctgcaccaaattctttttccatgccgctctttaacgtctcatatcctgccctgtccattggaggtgaataatcaccgatctgccggtaaatatcatccgcatttggaccgatcagggctattttttctgctctcccaatcggcagtacattttcattcttcaacaacactaccgactcgcgcgccagtttttccgactcctgatatgcctctgtcggaaatgaaacagcaccattttcgctgtaagaggcggtacggttcccgttttcatcaatataaggtttatccatcagtccctgctcaaatttcaaagtgagcactcgaaggaccgcctgatcgagttccttttccgtgataaatccctgttttaacgcctcctctaactttgtataaccttcatcccacagactgatatccacacctgctttcagtgcaagtgctgccgacctgatattatcccccgtcataatgtctaactggtcgatggcgatgccatccgccatcacgaccccgtcaaaccccaattgttcccgcagaatatcctgtagcagatgtctgttggcatggcagaattttccatcgatctcgttgtatgcagccataatgccttttacgcccgcctcacaacatgccttcgccgcctgtaaatggatctcccacagttccctctctccgatccgcgctgcgctggcattgacccctccggtcgtctccccctgtgcacaaaagtgttttgcaaccactgcaacgccctctttctggattcctgttacgatcgcccgcgcgagctctgccgataaatatggatcctccccataacactcctcactgcgcccccatcttgggtctcttaaaatatccagtgccgaaaccagtgcaaaatccacgcccatctgctttaactgcctgccgcacacctgccctgcccgctcatacaatgccgggtcaaacgatgcacctactgccagattgaccgggagcagatatccgtctaacgcctgatgtccatgtggacattcactgctcagtaaaaatggaattccaaggcggctgtgttcgatcacatatttctgtaactgattatatgcctgcatggaaagtcccccggcaagccctgtctcataatttttttccgaccatggatctgcacggtaaagaccatagatcgtgccgatcccgccccacttttttacttcatcctttaattcctgcgtaaaaataatttttccatcttctacatggtagatccgaaaaccatataaatgctggtttaactgtcccactttttctgttgcggtcatctgcgcaagcagcgcctctgcccgctttctgctatctctctccatatctgtcctgtcatttctcctttatttttcggctgtataatgcacttgcaataattccgaatgcagacaaaataaacaccatctgtatgttatctaccggaatgtttaaaatcctgatatcctttgctaatgccacaaatgtcgatccgagcatggatgaaaaaaatcctacaaacccaaccattgttgagcagaagctgacatagctgacacggtgttctaacggtgcaaaggcaaactgcatccgaaaagtcgcaatattgatgccgccccaggcaaccccgctcacagcctgtacgaccggaagccagtagatacagttttctttcgtcagcagtccccagccgatatatgcaactcccagcataaaaatggaccccagcgtgacaagcctccacgaataactgtctgctgccttcccccacagatttgcagccgcgatccgcgccaccgatgcaaccatattcatgacggtgatataaaaataggacagccccagattctctaacatataaatagaaaaaaacggactggcaaaattagacgccacactccacagcaggaagaaaatcaatatattgcggtaattctggtctgtgagcggcatctgtattgctttccttatgttcagtggctccacatatttcacattttccggttcccggatcagcgtgagacaggtaatgtcgaccacgcagataccgatacataaaatgccgatgatccggaatcccagaatctcctgatctgcgaaacggtaggcatctaaaattttacttaagatcagggaaccgcctgtggacgcaactaaagtcattgaatccttcagtccgagatatcttcccaaccgttcttttttcaccaggctgatcagccagttatttgccccggtgttgataaatgccccacagaaatgtgcacaggaatacagcaccgcgatcactgccaccgagattctcgctcctaacatcaatgtcggaacaaacagcatcatgagcaggcataagcgctggatgagtgcaaactctaccgtgatccgtttgctgcctgcgcggttctcatagacgacagaggaaaaaatctggatggtattcatcagcgtcggcagtgcagctatgatcccggtcagtgccgtccccgcacccacaagataggcaagtcccgataaaaatgcgccggaagtaaccgtaaaaatctgtgtggaagcgcatccatcgaggataaaaagtgccctgctggtccgatactgtttttccgtaatatgatcggaacactcaaaaatatggcttaatttattggtcataacgtaaatctccctataaaaagagaggcatcccaccgaactctcttcggaatctgaatgcctctatatgattttaaacgagttttacagtaacaacttcatacggtttcagttgtacacaaaccactccgtctttcaactctaattctgcttcttcctcctcgagcagattgcagacaaacgctttgttgtagttcccctcaactacaagatttgtctttgtgagtgcattttcgctctcatacatacggataatgatgccatgaccggactctgcacacttgatcgtctctaatacaacgttggacctgtccacagatgcttttgacaacaggcttcccggctttcctcctgccactgcaatagccggctggttcaggtcatatgcctgctccacggtctttgcttcctgccatttttccgcatgcggatagattgcataggtaaaatagtgctcttcctgatctgccaccggattcggttcgatgccggatttaatcagtgtcagtgccatatcagaatccttcacggaatgtccatatttgcagtcatttaacatgctgactccgtagtgaccttccgagagatcgatccatttctgtccgcagctctcaaaacgtgctttatcccagctcgtattggtatgcactttgcgtgtcagattaccaaactgtacatcaaatgttgcttcatcggtatgtacattgaccgggaaatgtacctttaacaatgtctgatgctctttccagtcaacataagtctcaaattcgatccttctgctgtctgcatagaaatggatcttctggtggatcacagaattgctttctttccgctccatctctaacgttgcacgcaccggaccgcactctgtccattccatagaaatcacatcattgacatcccagtacttttcggtatagtaaatatccacatcccagttatcaaagcacatcggcttatcctcgtacatgcggaactgattgccttttttgccatcctgcagtacttccctgtcgttttccttatcgtagatgcggtcaaaacgtccctccgcatccagatggatcgtataaaacggtgtctcaagcgtatggtcatccacaaggacaaacggtgttttctgctcaatttcactggatacagccgcaaatgtcttatatccttttgacggcagatgctctacatagaccactgcaccttctgcagtcttctgtaccggatagatcacgccctctgcatcctttaacgcttccgcatggatctccccaagttctacgatatcactgcggtcgtgtccggttgtattgaaaatagtgatgccttcgccatctcccacgagtgcatggagacgttcctcttccagtgctttgatctctttctgaagtgcagcgtattcttcctttgtcacctcatatacttcatggatcgcagatccaggcagaatatcatggaactggttgatcaggacttttttccacatgcggtcgagttcttctgccggatacgc

SEQ ID NO: 5264 - DNA, 924 bp, Unknown
  gut microbiota DNA sequence
tttaccaccattttcagcaattttatcagcttccgaacaggttggataatgaagatgtctggctctgtaatttagacaatgctgtctccattgcagagaacttcttgtaatatgcatcttcctgatcctgcagcttctgttcccacttcttgatcgtagtggtgtaatcactgtattcggatgccatctctttatcattgtatactttataaatactgcttaaagttgaagatttcatcttcgttccaattgcatcgtataaattggttgtaagctgctgcataaaggaaacgaccgtatccggatcagagttgatcattgccatcagcttatcttcgtttccggaagttgctgtatcgtcctcatcaccgtcaatatgatatgcattctgctgattctccggtgcattcaagaaacccagtgtcttgattccaaaacttgacagataatatttcttgccatcaatcgtaaccggctgactcatggcattcgtcatcagattcatgacactttccagactgtcatcacgacggagcaatgaagatttaattttctcttcccacttctcaacttctgaatcagacattgcactcttttcatcatctgtcaaaggctcatatccctttgctgtatccgcattgtaaagtgatgtcatttcgttgatcagagaattgtactgtgtcaggaaactcttgatcttatcgtaaattgcctgtgtatcggtcgcagttgtgacggtaatcgcattggtatccccatctccggttgcctgcattgcagtaatggaaagtccgttgatagagtaggtattcagtgaactggtgtatgtaataccgtttaatttaatttcagaatcacagccatcaatcttcttagcacctgaattggtatattgagagctctgatccataatttcttttgaat

SEQ ID NO: 5265 - DNA, 35920 bp, Unknown
  gut microbiota DNA sequence
atatgtccgtctggctttttgtgggaaagcagtactaccgtctcaacatgtttcgtccacggaaaaagatccaccggctgacactcctttgcctgatacccatgttttgtcagatactttaaatcccttgcaagtgtctccgggttacatgaaatatacactacgcgcttcggagcaagccggatgaccgaagataaaaacgcctcgtcacttcctgctcttggagggtccatgaatacgacatccacattgccatccggtgttgccttttttcccgattttgtggcatccggcacctgattttttttctgatcggcacggtattccgccatctccaccataaactgtcctgcatcggcattgtaaaactggacatttttgatgtcattgcgttttgcgttggttacggcatccctgactgcatcacggtttaactccacactgatgacctcttttgcttttgatgccgcgatcagaccgatcgttccgatgccacagtaagcatccacaatcctctcttttcctgtcagtccggcatactcgatcgccttcgtataaaggatctccgtctgcaccggattgacctgataaaatgatttcggggaaatacggaacgtacagccgcagagtgtgtcctcaatatatcctttcccgtaaataacggtttctttttctcctaagatcatactggtctttttgtcattgacattgagaacgaccgttgtgatctccgggtgaagtttacgcagtgccttgacaaaattattcttggacggaaggatcggggagccaagcactaatactaccatcacttctccgctgtgaaaaccgcgacgcaccagtacatgacgcagcagaccatatccggtatcctcatcataagtcttgattttaaaggaacgtaaaagtccccggatatcgcggatgatcgcatctgccgtctcatcttcgatccggcaggaatctatgtttacaacatcgtgtgtccctgctttgtatacgccggaaatgacagatccgccttttgcaatgtcaaatactgcatgcactttgttgcggtaatgataaggatgctccatcccgatgatcggcagtactttgcagaattctccgacattttttctgacatattcctgcttttctttgagctgtttttcgtagggaagtccctggtaatcgcagccaccgcatttttttgcatactggcacatatctgcgttctgcttcttcgtgatcattttttccgacgtgttttttcctgatacttttttctcttttaccgattttccatgatccgttttttctgtaaatgctttagtcactacatacttcttttccatttttccgatggttcgcttttctgcgtcctgcttcgctgttttatcaaccgcatattttttctttcccatttttccggcggttcgtttttctgcctcctgcttcattattttatcaactgcatactttttcttgcctgcagctttatttttcgctatgtctttatttttaactttacctttgttcctcattgcacttttatttttcattgcatttttatctgccatttcaatcctccattcttttcaataaaaacatcactttcattgacacctcatgtttacgcacaagcacaaatcctgcgcacaatcctcaatctctcatcgtgctctgttcctcgctctgcaccaagacacagtattcctgcttttcacttgtccctcaaacctttccgcctcacgactcttccacacactgactcggaatgttcagataggactctccccagttacacatggcatttaggatcggtgacaggctctctccaaactccgtcaggttgtactctgttttgggcgggacaaccggatagacggttcttttgataagtccgtctttttccagttcccgaagttgctgtgcgagcattttatcggtggctttcggtatctttttatgaagttcactgtagcggagcgtttttcccatcagatgaaacaatatgaccgacttgtatttgccgccgatcagggagatcgtcgcctccaccggacagttaaattccttattcatagatctgtttctccttacttactttttcggaagtatataccaaaaaagtgcatacttgcttatattctgcatttccatataattatagacatgaacgttcagaaacacaagatagaatccgaaataaacaggattatcccagcgaaactgcatgaaattcaattatgtgcaaaaatcagctcaagcattgaggattagcgtgaaaaataagatttttcacacgcaagatccgtgcttacacacaaactcaagatgcacaaaaaacagctcaagaatggagattatcatggaattattagagattgcaaaaaagagacattctgtacgaaagtacacaggaaaagaaattgaacaggaaaaactggataaaatcttagaggctgcccacgtagcaccaaccgccgcgaacatgcagccggtacgccttatagtcgtaaaaagcaaagaaggactggaaaaagtcggaaaggcagcaaatatttatcaggcaccggctgccattgtcgtctgtgccaataagacaaaagcctggaagcgtccgtttgacggcaagatcacaaccgacatcgatgcctcgatcctgaccgaccatatgatgcttgaggcaaccgagcttggtcttggcagtgtctggatttgctactttaacccggacatattaaaagaagaactgaaccttccggaaaacttagaaccggtcaatatcttagctcttggatacagtgatgaactggatgcatccgcagagcgtcataaagatatgcgcattggcatggatgagctggtttcctacctttaaaacaaatagcatgcaccacaaacaaacctgtgattttaagtaatcacaaaattgccaggatcatgcatcagcatccgaatgtcagattttaatctgacttccggggttgtacattgccctggcaatttctttatcacttttctattcaggtgcttaccactctgacttaccacttttcttaccactttgaatcacggttttgtgatattttgcgatactttacgaggttttctctgtcaacgtcaaatgccttccatcacttatcaatcaagcatttccaccacttcccagtccttacttctcatgacgaacgcctagcgttcgtctacaacctgaaagatatagaacttcaaataataactctccggcacattcgcagaatttgcccagagaatcggatgatccggcgcctgtgttctgaattccacctggcggagtctcttgtgtgctgcctttgacgcctctttgactgtctttgccaaaagttcctgtgtcatgaaatgggagcaggaacaggttgcaaaatagccgccgtcttttaccagttttaagcctttcatgttgatctcacggtaacctttgatcgcgtttttcgttgcctggcgcgacttggtaaatgccggcgggtctaagatgacaacatcatactgctcgccgctctgcgccagtttcggcagttcatcgagcacgtttgcacagcggaaatgaacggtatcctccagtccgtttctgcgcgcattttcgtttgcctgctgcacggcatactcggaaatgtcaagacctgtgacatccgctgcccctgcaattccggcgtttaaggcgaatgttcccatatgggtaaagcagtctaacacctttttccctttacagatccgctgcattgcaagacgattatacttctggtctaagaaaaatccggttttctgtccgtttacgacatcgacaagataacggactccgttttccttgatctcaacattggtgtcaaattcttccccgataaatccttttacctttggaagtccttctttagtgcgctcattagcgtcgcttctctcgtagacgccgcgcactttgatgccgtcttttgcaagttcttcctttaataaagaaacgatcgtctccttaaactgctccatgccaagtgctaaacattccaccacgagtacatcctcatatttgtcaacgacaagtcccggcaaaaagtctgcttccccgaagatcacacggcaggatgatgtatcgaccgtcgttttgcggtattcccaggcatttttcacgcgcatctgtaaaaatgtgcggtcgatctcctggtccacatgtcttgtcagcatacggatgcggatttttgaattggtattgataaatcctttgcccatcggatagccgtcaaaatcatgcacgaccacgatctctccgttttcaaaacttcccatgaccgtatcgatctcattatcaaaaatccaggcaccgcctgctttgatcgttcttccctcacccttttttaatgtcacaactgcgctcatttttcatccacctttctcacgcttttcttttctataattcacacgattccatgccagacagctttcatgcctgcatctttttctcacactttttcttttccacaatttacaatataaatccccacacagaccagcactaatgccacaagacatgtcacgctgaccgcattctttatttcctgatttttgcatttacccattgtagcacattctacgctgcctataaaatattttttgagcaaaaactgtttcttgtaactgcctgtcatgtccgatataataaatacagaaatatattgacaaatccagtctcaaaaatatacacaacagggggattttccatggctacgataagtttatgtatgatcgtaaaaaatgaggaggcggttctcgcgcgatgtctcgactcgattgcagatctgatggacgagatcatcatcgtggataccggttctacggaccacacaaaggagattgctgcaaaatacaccagccagatctatgattttaaatggacaagcgatttttccgcggcaagaaatttttcattttccaaggcaaatatggattacatctataccgccgatgcggacgaggttttagatgattttaaccatgagcgttttctccggctcaaaaatgcactgctgccggaaattgagatcgttcagatgaaatatgtgacggatgccgatttcgacaccgttttaaatgcaaaaaaagaataccgtccgaaactgttcaagcgtctgcgcacctttacctgggtcgatccggtgcacgagacagtccgcctgactcctgtgatctttgacagcgacgttgagattttacataaaccgcagaattttcacagcaaacgtgatttttccatatttatcaaaaacttccagagcggccacgaactctctccgaagatccgcacgatgtatgccaaagagctgttaaagaccggtgacacaaaagactttcaggatgcgaaaccaattttccagtatatcttagaacatgacctctccgatgatgccatgaaagaagcctcctgcgtactcgcgcatgtgtaccgcttagaggacaacaaaaatgaatttttcaagctgacgatgaaggatatgctgaccactccatgttccgagatctgctatgagcttggtacctattttctcgcgcagaaagatttaaatgaagcagtcatctggttctacaatgctgcctatgaaacggagagcatcttagatgtccacaccagcggcgatctccctctgtacgggttagttgaatgttatgagctgcttcttgccgaagcaaaatcgaatatcccttcggataccatgctggtttcaagctatgagaaagcgttggaaaaataccgccgtgagtcgcagagctggacgatgccggtagagaactagatttttatcccggacgataaaatatacatccattttcatacacgaaaaacgctgcatctgccttcatttataaatgacgcagacacagcgtttttcggttatttccatatcttaatcttcaatcatccagcgatacattccatcctctgattcctgtgctccattttctttcatattctgtaaaaaggaagtgatttcgctctcttctgccatatcgttcataaaataaaaaagataaagtttctccttttcatcgtcaaccaaaaagtccagatacaccggttcatcggaaacaacgaacgcaccttcttcttcggaataacggtctgccgtgcattttaactgccatccttttaagtgatctgctgcctctgcttctttccgctcctgctcatatacaccgtttggcataaaatgcaccagacattcttctttggactggtatccatattcctgtttgagctgttcttcatcaaaatccagtacatcgacctgtaatactggctgatccgctttctgataagaatacacactcttgatcatccagtcacacggtatctgcaattcataatcttctataaaaatagataatgtaccattgtttccttgtatatcctcatttttttccccacaactacaaaaaaataataatatacataaaattaaaacaacattgtatcttttcatattttatttccccaaatcaatcttattattatcaaaaaaacgtaacggaccgcctgttgatccatctatactataatcatagtaataatgcaagcattgataaaaactatatttctttttatcaacaagatatctacatccattttgcatcaatcttcctccattttttccactagaattataatcccctgctccatatcctgccgcaaatatatttcctttatagctttccatccaaatattttttactgcattgtaatcggaagttacttttttattctcgctaattttttcaggtttatatgactgcatggtattttttatatccacagaatgggtaggatcaatggggacaattttgtaatgccatgtatatgtttttatagcaatatctactgcctttctcgctgtaccatcaaatgactttcctcgtacttctccagcagaaacacctttacagtagtcatgaaattttatagactttcgattctgatatacaccatttttataggtaccatacgatattgttgtatcatctgtaggaactgttcttttatttaaaatagcatattcatctactaaacttccatctatttccttttcatttatatctgaaaaaacttttccttttccattaaccaaataaccattttctcttgcctccataatattctctgttatattataatcactctgaaagtggtatcccttcatctttaataaacttgggtcagcaatttgcattaaagtattaacacgccattgaccgttttgttcctctaatatcaaaaaattataaataattccttctgaaaaatattttgtatcttcataaacatcataatctgcacctacagcaaaaattttaattttctttcctgtataatcttcatcaatcatatcctttacatcatcatattttatttcaatactttctatcaattttgcttttcttacattaagtaccccaacatattccctaatatttttttcattttcaagaaaattcttaaaagaattgatttgttcatttgtatataattcagcaaatttatcccaatcatttccaattaaagaaaaatactcattcactatttcctgtgcactctctttatttcctacaccagaagctctcacatgcacactgaaacataaaacaattgcagttacaattacaatcaatactttttcataacatttataactatccttcattatacttatcctcctaaagttttttacttaaaacaaataaattttttgcgcaataaaatttatacatatagtaacaatacattatacatttgtcaacattatattgttattctatgtattgatttttaaatgcatcttgtttattatatttaataaagagggtatatatggaaaaaaagaaattaaatcttgaaaccacacttaaaaaggcaacaattgaaatgttgctcctaaatttattaaaagaacaggatatgtacggttatcaactttcacaggaattaaaaaaaagaagttctggattatatactattttagaaggttctatgtatccgattctttatcgtttaaatgatagtggctatatttcattctttgaaaaaaaagtcggcagacgccaaacacgcatttattaccatctggaagacaacggtcttatgtacttagataacttgcaaacatcttttcaacaatatgttaatttaattcaatttttattaacttcaaaagaaggagaaacttatgaagaaaagacaggctgatttcgttcgaaaatatatgcgggaacttcgccatgctcttcctatcaattatccaaatcaaaaaaaaattctgcattcaataaaacaaaacctgattaattatataaacgaaaatccctattcggattattcaaatcttacaaatgaatttggtacacctcttgataccgccatttcttttatgaatgaaatgccagaagaaacattttcagaatctttaaaaaagaggaaaaaaatatttcttatatcaataatattacttattatatgtactgctactataattacttattttaactatcttgcagctactactccaatttatattgatcaagttacatatatttataatgatactgaaatttcttatagtacagaaattttagataccgaacaatttaattagtatatttaatagaaaggatatctttatgccaaaaaaaatcattattacaactctaattgtcttgattacaatcatgtttcctgtcaacttaaaagcttcccttataccgaaagaaatatctcaaaattatatcatttacgaagatgacaatttttttatcgaatccaccacaactatctattttcttaattctccattatcaaatgatcgatctgtttctaagaataagtctgttcaacgtactaatacaataaaaaataaagctggaaaaacacttgcatcttacacattatccgccacatttacttataatggacgtacttcttcttgtacaaaaactaattattcaacctcaacatcaaataatgcttggtatttttcatcagctacagctcgtaaaaaggattatatagcaaccggaaattttactctaaacaaaaaaaaatctactgtcaaacatacctcaacgattactatttcttgtgacaaaaatggtaatattcaataattgaatttctttcataaatataagatatcttgtcaaaccctccataaagtgttaggataagactatggtaattttttaacaatctttttatatcatgatttttaacaattatgaggaggtatttgtgatggattattcacaggaatacaaacagaaacttgtatctgccgacgaggcggtaaaattgatcaaatccggtgactgggttgatttcggctggtgtacaaacaccgtagatgcccttgatcaggcgctggcaaaacgtaccgatgagttgacaaacgtaaacctgcgcggtggtatccttttaaaaccgttagctactttcgcacgtgaggatgccggtgagcactttacatggaactcctggcatatgtccggtatcgagcgtaaaatgatcagccgcggatgcgctttctattcaccgatccgttactccgaactgccgcgttactaccgtgagcttgactgcccggatgatgtagcaatgtttcaggtagctccgatggattcccatggatatttcaatttcggaccaagtgcctcccatctcggtgcaatgtgtgagagagcaaaacacatcatcgtagaggtaaatgaaaatatgccgcgctgccttggcggaacagaatgcggaattcacatttccgatgtaacatatatcgtagagggttctaatcctccgatcggcgagcttggtgccggcggtcctgcaacagacatcgacaagacggttgcaaagctgatcgtagatgagattccgaacggtgcatgcttacagcttggtatcggcggtatgccaaacgctgtcggttccctgattgcagagtctgacttaaaagacctcggtgtccacacagagatgtatgtagatgcatttgttgacatcgcaaaagcaggaaagatcaccggtgcaaagaaaaatatcgaccgttaccgtcagacctacgctttcggtgcaggtaccaaaaaaatgtacgattacttagacgacaacccagagctgatgagtgctccggttgattacaccaacgatatccgttcgatctctgcactcgataactttatttccatcaacaacgccgttgatatcgacctctatggccaggtcaatgcagagtcagcaggtatcaagcagatcagtggtgccggcggacagttagacttcgttttaggtgcttacctgtcaaaaggcggcaagagctttatctgtctgtcctctacctttaagaccaaagacggacaggtgcagtcaagaatccgcccgacattggcaaacggttccatcgtaaccgatacccgtgccaacacacactatgttgtaactgagtacggtaaagtcaatgtcaaaggactttccgcatggcagaaagcagaggcattaatctccatcgctcacccggatttccgtgacgagctgatcaaagaggctgaaaagatgcacatctggagacgcagcaacaaatactaattgcacataatctatgcatgcataaattatgcataaagaaaaggcagaaccgcttcatccccggctctgccttttcttttttatactcattttttcacacagtccagctttttgctatctttccatctctggcattccctatactgttgctttctatttttcacaccggcatttcacccattctgttatctttccagttctgacattctcacaccgttacactctgttttttcaggaaattccaccccagcactgccataatgactgcagctatgactccaacgacaaccagatactgcacgatatttccgaatccgatctgcatgccaaactgatgcatctttgctgccagtgcttcattttcaattaatttcgccggcacaagtgtgacaaacatccagatcgcccagattgcccagaatgctttcattccaaaccgcagggttacagcccctaaaaacagttcaacgatcgtcattcccacaatcactgccagaagatatttccactgaaaatactgtgtgaggtcaagtatcacttcgcactgcggataaatcacgcgcatcagggcggattctatcttcccaagcacgaacagtaacagttctaatcctgccagttctgccatattaaacaatgcataacttcccacatatgctcttcttgtcgctcccatggaaattgccatattaaattccccgacaaaagaaaatatgataccaaagaaatgcataaataccagtgctgccatcgcgatcaacattccaagagtgacacactcattttcttccatggtatttgcccggatgatcatcataacaatgattccaaatacatagctgccaaatgcaactgcaaggaactgcagcacttccatttttcttgtcttacactgtatcaaaaaattacctgtcattcccacgctacccctttcatacggttttcattttgtgtataaaatactcccgttgctctgtcgtcccagtcttctacacaaaatactctgttttatacccggacttcatacttcgatacaacgcgaagcatcatgaccagactgaccgcatacagcgcagctgctacaactgcaccgatcaaaagtcccatcgaaatgacactgccggactgtccctgaaaccatgcagtcagcgtatccgccagatcgctgcccataataaaacctgcaccaatacccatcacaactgcaactgtcacaatgatgccgactgctattcccttttttccataacgcatctgcagaacagcgcagatctgaccgaatgcaatacacaaaacaaatgcttccgcgatcagtatattcttaaatccatccattctgcctgcggacatatatcccgtaaaaaggataaacagatatgcagtcaccgcatagcccgcatataacagctgcgcaccccatgcagcttcctttctgcctgatccaaatgaaagcaccatcggaatataggctcctccataactgatcggtccaatatagttaaacatgatgccgatcaggaccgcaaagaaattagcgctctgccagaatccactgtcagcactctcacccatactgaaaaacaaaccgtacagcaaaacaaatccaatcaggatggctgtcatctgtattccatattttccccagaaaagcaggttcctttttattatcattttagactgttccattttccattcctcccgctatttcctagtcgtctaatccgcacagtgaaacaaataatttttccaggctgatcggctggatcgtcacatcatagtcctttggcagctcctggccttcttttaaaaggatcgtcacgctcttgctgcgtcccattttttcctcgtggtgtttctcataaccttccgctgcctgatctaccacttccgcaagtccgctgacatgataacttctctctagcagatcctgtgtattttctttcagtaaaaggctgccatccttgatcatgatgacctcctccatcagatccgctgcctcctcgataatgtgtgtggagatcacaaaggtacggcctgtttcggtgtattcttccatcagtttatggtaaaagtactcgcgcatcacgacatctaaccccgctaccggctcatctaaaaaagtaaaatccgctttgctggcaagcgccacaatgatcgttaccatggaaagcatacccttcgacattttgttgatacgctgtttcgtattcagctcaaatttttcaatcagctcatctgccattttctgatcccagttcggataatagtaagatgcattttttaaatactcttttacttttaatgaactgacaccacttccatacaggttggttgaaagttctctggagaaacagatatgatctaatgcttttctgttttcccatatcttttcgccgttccaggtcacatttccctccgtcgccggattctgtgcggataaaatcgataataatgttgtttttccagcaccgtttcttccgatcagaccatagatctttcctttttccagtgtgaaatctatattttttaaaacttcttttttcccataactcttattgacattactgcagatgattgcttccatcttattttccattttatcttcccccttattgatctgctgactggatcagtttaatgacctcatttttatcaagtccaatgcttgccgcttcctctaacaattttttgacatagtgatcaaaaaattcgttccgcctgcggtttaaaatgttttcttttgccccttctgctacaaacatgccgattccccttttcttatataagattccttcatctaccaatatattcacgcctttcgccgcagtcgccgggttgatcgcatataactttgccagctcattggtactcggcacacgctcttcctccagaagaatatccctcaaaatatctgtttcgatcatttctgcgatctgcagataaatggatttctcctgcgttaagatttcattcatgcatggtggctcctttctttcaatttcattcctgataagattccgttggcattatgtggttggtttgttatgtggttcattacttgtgtaactaaccatagcactatgttacgatattgtcaacaaatttattcataaaatttagaaaatttctataacgcaaaaaaagcaacaccatcacaacccacctgtcaaacaggtcagtcatgtgtgttgccttgtcaaataaccaaaaccgatttatctcattttttccatctacggcatcatgcttcctgcgttctgcccccggccatccgctcacggatctccactccggtcggtgttcccgcaagtccgccttttcctgtttcacggatatcctcggacatgcttcttccgatactccgcatcgcatcgatcacctcatccggcggaatcttgctgaagattcccgcactcgtcagatccgccgatgtcagtgcattgactgcgcccatcacatttcgtttcacgcacggcacctctaccagaccggcaaccggatcacaggcaagtcccaacagattttttaaagccagtgccgctgcatttgcgatctcttttgcactgccgcctgataaatgcacaactccgcccgctgccatcgcagacgcagaaccgatctctgcctgacagcctcccgctgcacctgccagaaaagcacgctctgcgatcactccgccgatcccggctgctacaaacagtgcttccaccattttttcctcagaatagcctttttcttcctgcagactcaaaaataccgccggcacaactccgcacgaaccggcagtcggtgccgcgacaatacgcttcatgcatgcatttgactcactggtctttaatgccttctccatgactttcccgataaaatctccacagagcaaagttccctctgccctcgcctccatcatctttttaccttccgtaccgacaagtccgctctcggattttaatttttcatcataacgcgcatccgcatctttcatcgcctgatacatcgcgcgcatctgctcaaatgatacatcctccgtgatcccctgctccctgcagtcgtcctcctgcacgatcttccagaacggtttcccggatttttcttctaattcgcataattcctgtaatgatccatacatgaaatgttcctactttcttatgataaattctactcttccacaagactgcaatatgtcacttttaatatgccctctaaccgctccagccatgcaagcgattcttttggcacttcctgatcgcactctatgaccatgacggcgctgccacccctgcttttccggtaaagctgcattgttgcaatgttgacacccttgtgtgcgagcatggaagtcacttcggtgacatgtcccggctggtcgatgttgtgcacgatcagtgtcggataatcgccgctgaaattggcagtgatcccgtcaagctcacagatctgtatccgcccgcctccaatcgaagccgcaaccacttcgagtgtacgcccggaaacacctgtcagattcattttcactgaattgggatgcacatcaccaagatcaatcccctctaaggaaaaatccattcctctttcgcctgcaatccgaaaactgtccgggattgccggatcatccacctgcatgcccaaaagtccggcgatcagcgccttatccgtgccatgtccctttcccgttgcaaggaaggaaccgtgaaaatatatttttgcctcttttacttcttccgcaagcagcttacggctgactctcccgatcttgacggctcctgccgtatgggagctggatggaccgaccatcacaggtccgatgatgtctaacaggttcatatcatatctccgtttctctcataagtatttacttatgttttctataattttatcctatttgaagttatatcaaatccatgatacattttaattgctatatacacacacacatttatagcatagaaaaggacagcgtttccacctcaggaaacctgttctttttattttacagcaacagcgtgttcgtatcagtctgcccgtgaaacataccatcggttgttttcatcgctctaatctcatcatgcccataccagcgcacaatatccataaaatcacggagtggatcattccataccttatgtggatgatataccagatttaaatttctttcaagacaaagatcttccacttttatttccgccagacggccttcttttaaatattcctcaatcagacaatatggcagcacagaaataccaaaaccatcttccaccgcctgcacaagtactttcgtactccggctctcccagagcggatcgatcacgcagtcttttgtccttaaaatggcttcaaaacggtcacgtaccccggctcccttttcccgcagaagaaaattttcttttttcagatcctcaaatctgacatgctccttccccgccagtggatgatccggtgccgcaacgatcagtgtccggtcctttgcaaacggctcctggatatagtcggtctcgccgggcagatcttccatcaatcccagatcgatctgatgcgtttttaaaagttccatcagccgcactgacccgctaaccgttactttcacttggatatctggatactttttttcaaatgcacggataaatccacgcagcattttcacgccgacagaaaggtttgcaccgatacggattgtccgcaccccttccgtttcttttaaatgctgttccaaatcctgatacaatccaaggatatggcatgcatactgatatagaagcctgccgctctccgtcggcaccactttacggttatagcgctctaaaaaacagacaccgctctcctgctctaattccttgatggtctgactcaccgcaggctgtgtcatatatagtttttcggccgtctttgtcatgcttccctcttcacacactgtacggaaaatagtcagctgtctgttattcataggcattgtcctttaataataaaatgtcctttgcatgcactgccagagccggcgggatcggtcctggcgaatcttcctgttctgtttttgctattttccactgaagccacccgctctctttcgatggacgaaatgaaatattccactcaaacggatcctcaatgatacgggattcctcaattttaaaaatattttcctcctgtacagggttcctatactttttaaggcccgttccctcctgtatcacactcacacgagattcatttgctgcactctctttgccagatatctgctctgcattcaccggataaaacgaatgtgcccggataccaaccgcctttgtttcctccggaatctccgaaacgcaaagggttatcccccagccaagcgcttttatatggttgttatccacaatttctgctgcagaaatgttcttacatccggataacactgccgccgtctttgttttcgggttatggaaaaattcttttgttttctctatgacctccatttttccatggtcgatgcagcttaccatgctgcacagacgataaacctcatcccggttgtgtgaaacaaaaagtaccggtttttgcacctccgctaacatatctcgcatttcctgctccagctcccatttcaggtaactgtcaagcgcagaaaatggctcatccaaaagcaggatatctggctcagaagcaatcatccgcgccattgccacacgctgtttctgcccgccggaaagttgtgcggggtaatgtttttccatcccctctaaacggaaacggttgatataagatcttactttttcttcctcctgatgttttcccatgccggctttgatattctgttcgaccgtcatattcggaaacagggcatagtcctgaaacatataaccgacacgccgtttctgcggggtgagattgatcttttttgcagagtcgtataaaactctgccatttaattcgatccgcccctcgtccggcgtctcaattccggctatacattttagtgtcatgctctttccacatccggatgccccaagaatcgcaaatacgccacgctcggtctcgaacgcgacgtctaaattaaagttccccagcctcttttttatatttactttcagactcatcacagtcctcctgcctcaccatctgtcgcatattttatatgctgctttcctttttcctcctgactgccctaccatctgctcacatgtttcatattttttgccgtaatgatatttagtaaaaatatgaccacaaatgcaatcactaatatcacaatcacccagaatcccgctgtcgtatagtcgccgtcctggatgaccattgcaattttctgtgagatcgtactcgtttttttcggaatatttcccgcaagcattgaggttgcgccatactcaccgagagcccttgcaaacgttaaaacggttccggatgcaatacccggtcccgctgccggaacgaccactttccagaaaattttaatttcaggcatcccaagtgtccgtgccgcatagatcagatttacatcgatctgctcaaacgctgccctggcattccggtacatgagtggaaatgcgattaccgtcgccgcaaggatacagccaagccatgtctgtaccaccttaaaatcaaatctatcgtaaagatatgctccaaacggtctcctgaggctgaacagcaacagcaggaaaaacccggctaccgtcggtggcagcaccatcggcagtgtcagaattccatctgcaaccgccttaacacgcggtcctgctttcacaacttttcgcgctgcatagattcctaaaaaaaaagaaataatggttgctacaattccggtctttaacgagatcaaaagcggactccagtcaagtccgcttaaatatgctgccaactgactcataactgcctcctgttttcattttaaattttcagacagccatttatcatccatcttttatcctgatcatttttgcagcataaaatctactgtctcaatcactgtctttattggtttgaaaataaacggctgttcaaaaaatttaatctttattcaacatctgtatcaaaatagtatttctggaagatcgtttttgcgtcgtccgaagtcaggaaattgataaaatcctccgcagcactctgctctaactcatctgcttctttattgatgatctgtgctaccggataaataacatttcctgtcagctcataaggaaccacctctaaaatttgaagacgatcctcaaagccgtaagtatctgaataatatacagttccgacttcattcgatccctctgcaaccgcagccgttaccgcacctacattggcacactcgttaatttccacaccgccaagtgcttcctggatttccgatgtcgtgatctgtgaaacatcatccactttgtccagcattcctgcatttaccattgcctgtctggtatattttccaaccggaacagaaccgtctgcaagcgcaatgctctttgcttttccaatatcagaaagtccggttacctccgttccactgcctttccatgtgaccacgcagacctgattgtttacaacgttgtgtctggttccgtcaacagccagtccgtcctcatcctgaagctgatccatctgtttctgtgctgcggaaaagaatacatcacaggctgctccctcctcgatctgtgtcatcagggtacctgaactgtcataacttcccacgatagatacattcggctgcgttttgttatactctgcgatcagctcttccataaccgtgtttaaacttttcgctgcaaataccgttaccgtggtcgcctcaaaaggctctgctgcagttgtttctgctgcttctgaagtttcctctgccgcctccgttgctgacatatctgcgcctgatgattcgtcagcatttgcttctgcaccctctgtctcagaagatttttctgcatctgcggaagccaccgtattagtctcacctgctgacgcctgatccttgtttccgcatccggcaaacatggtcattgccatcgctgcagaaagtaatacacacacacatttcttcttcatttgtttttactcttttcttttcatttatattttaagtgctattaatatcatgtctttttatagattttaaatttatttttaattttttcatctctttttagaccgcacctcaataagctgtgctgcaatactgatcgcgatctccgccggagtttcacttccgatttcaattccaatcggtgctgtcacacgcgcaagctgttcctcggtaaatccttctgccagtaatttatcggtgacaaattttgtctttttcctgcttcctacaacaccaatgtacccggcaggagttttcagtccaaagcgttctgcatctgtatcacagagatgtcctcttgtaacgaccacaatgtagtcctccgggtgaatcgtaaatgtttcttccagttttccaaaatcaatcaaccgtatctcttccgctcccggaaacagttccggcttcgtaaattcttccctgtcatctgaaacaatgcatctgaaaccaagatgtgacaacaccggaacaagttcctgcgctaaatgcccgcccccaaaaatgtatacttttccatcataagaaaactgttctgcatagaaacgtgctccatctatttctgtcacagactgatgcgcaaaagtctgaaactctggcagtatttttattttcccttcctctaacggcatcaggatccagaatgcttctcttttttcttctgcctcttccatctgtctgatccatgcggcatcttcccgggcatccacaaaataaaacagcactgtcgcatttccgccgcatgccattccaagttctgcagatttttcctgaccaagattatactcatgcagataatttttcttttccgtaagaagtttttgtcccagcagcgttgcctggtattccagattaccaccgccgatcgttccggtcactctgccatcctctccgactaccatataggcacctgcttttcgcgggattgaaccgcgtcccgctaccacagtgacaagcatactgtttttattttcgctgatccttttcttaagagtttccacaatttctttcatagggcattctccttatattgtatttctatcacatcacgattcctgcaacagcagttcatccccaacatgaatcgtgccgccttctaacacaactgcaaaaacaccttcatgtggcatgatacattctcccattctctgataaatctggcaatgggagtgacattcttttccgatctgtgtcatctcaagcagcacctttccgcagcgaaatctcgtaccgaccggaagattcttaaaatcatatccctccacgatcagattttctccaaatgctccgaacgcaacgtctgcaccttttgcacgaaattcttctattttttcaaaggaaagcagactgacctgtctgtgccattttcctgcatgtgcatcgccctggatgccccagtctttgacaaacccggcttctgccacctcatgcttttctgttcctctttctttgctgatacaaattccttttatgattcccatgtatgattgctccattttctgatgtttttcatccgtttcattgcaggtattttcaatcctttataaatactttggaatttttgtttctcatatcagtgattgggcgatttctctatattactacatatttctacccatttttgcttacatattctgctcatttacggtcgattgggcgaatgcagttcgttcatgtatttttcgcccatttcagccattttccactcatttcattgcgtattttgggtgtttttcatttaattataattaatttcacccattctcgtcagaattacatttctacctgcattttcattgtaaatcaattcactccgttgcattatccaccaatacgcaccattgcattgtgctctgtcatttcagagacctgttcaaaacaatgctccgccggtttttcaaaaattgcctctttcatcacttcctgcaatgtctgttttctccccggatcccggagaacggctcttaaatcaacgcctttttcataacagaggcatagttttaaatatccttccgaagtgagccggatgcggttgcaggatctgcagaatttatgatgcatggcactgataaaaccgacatccatatttaatcccggaaaacggtagtaagctgcaggacctgcgccatgttttccggattgctgcttctcttccgtgtacgacaaatcccggatatctgcactatatttttcgccttccctgtttctcacagttccggcttctgatacattcccatagcactcctcgatctgccgaaacaattcttcattggagcctccagtatacgctgccccatacccgatcggcatcatctcgataaaacgcaccggaatctgcactctatttgtataatcaagaatagatttccagtcaagatgctgataatgcacggtattaatctttaccggaatttgtgcctcttttgcagcattgattcctgccaacactgcatttaattcatcccgtcccgtcagtctttgaaattctgtttcatccaaagtatcaagactgacattcacactgtccagtccagcctctttcaaagcctttgcatactctgcaagcagaaccccatttgtggtcattccaaccgtttcaatgccggaaacattttttattttttctaccagatccacacagccgcggcgcactaacggttccccgccagtcaggcggatatgccggattccaagtgctgccgccgtctctgtcacctgaacaatctcctcgtaggtcagcagattttccatatctgtcgtctctatatcacccggcatacaatacttacaacgcagattgcagcggtcggtaatggagattctcaagtagtcgatctccctgcctgccttatctttcatagactcatttaccagccctttccaaatccacaattcgggtaaatacagtggtcacagtttaggcagagtcccccttctccaagcgctgcaagctcttctgctgtcactttatcatcagccataatgcgtggcagtaccagatcaaagattgtgcgctttgcatacatcacgcagcccggcagaccaaggatcggaacatttccgttgtaataggaaatcagaaacatcgctcccggcagtaccggtgcaccgtaagaaatgatctctgcccccgtgtttttgatggcaagcggggttttatcatccggatccacactcatgcctccggtacagatcacaagatctgcccctgcctcgatcgccgcaagacttccatccgtaatcttttgattatcatcatcaaaagtttcatgaaaaatgacttctgtatcatattctgccagcttttcccggatgaccggtgtaaaagtatcttcgatccttccatgataaacctcatttccggtcgtgatgatcgcagcttttttcttatggaatggctttaatgtaaaaatcggggcatccgcacaaattgcttttacacgttccattttatcttttttgatgacaagtggaataattctggttcctgcaagcttgtcccccgccttcaccggtgtatttccgtggcggctggcgatcatcatttcaccgaagctgttcacctttttcaatttttctttgtcaacttttaacagtccgttgcagtctgcaatcagctcaatttttccctccttaacatctgacggatgcatatggtcgtttttacacatctcataaaggatctgcgctgcttcattttcatgaagaatcgtgtcatctttttcccagatgtaaatatgatcttttccgacactcagaagtaccgggatatctttctccgtgataatgtgccccttgcggaaaaccacatcttttgtgacacctttaatgatctgggtaatgtcgtggcagagaacctgaccgaccgcatcttctgtttttatcagtttcatgaagcgtatgcccctttctgtttttatgataaaatattactgccaaatgcgcagacaacctcaagcacactgcccgcaatgcagcgtgctttatccgaaatggtgaaacaatttgacagctcacttttacgcggatcaatgtccgcgatcttaaagccttttgtaaccgggtatccatcacggatcagtccacggataatgccaggtatcgtggcggtcacggaatatctgcgattttctttttcatccgcgatataggcgatttcttcgccctgctccacgatatcaccgatcttgtgcacattataaaggattccttccgctcccgcatgaatcacacgctctgccgtataaccgccaatattgcctgggattccggtatttggaatggctgatccctcacggataatccgtccaagattgtgtccacgcatcgtctcaatgacaatatcaacatcctctcccgctgcaaatccgggacctaagcctatcgtaagcggtgccattgagcggttcgttccaagattcttcttcgctaaaatcgcatctacgaccacttccggttttaatgccgtaatacttgctccatccggatctacaatcaatgggactttcccggtatcgatcactttttttgcctctgcagtatctttgatcagcactgcttccatgccctctaccgtggcgctgccctcataaactgcctcacagacggctacctgacggcggatcgccgccgggtggtctgtctctaacaccagtaccggaaatcctgccgcccagagtctgtgaatggttccggtggcaagatcaccgccgcctcttactatgatgaatggtttctgtctcatgtattttccctcttttaaacactcctgttttctcaggcaatccctcaaatcaccagttcaacactctgatctgtttcgattccaaatgtatggatctgctcttttttctgttcatattctgccggttccatccgccacgcaagaccgcagtctgcagaaagctgccttggcacaggaatcagacgtccgttgatatgattttccccgcagtatttttccattgccatcgccgctgaagttgtatgaaacgtaatgatcctgtaatttttcttttctctcatatatttataccggaattttttctccatttttcttgtaataaagagtcgcttgcgactcttttgcgctcgagcggtgctgtttacagctaacttctgctccgcgaaatgcacatcccgcccggagggctttttaattcataggacgtaatttcctatgaattaaaaatattttttacagcacaccaacataaatttctttttctgcttttggaatgatctctccaacaatggctgccggatgtcccgcctgttttaattcctcgaaaagcgcttccgcctgctggctttccaccgcgatcagaagtcctccggaagtctgcgggtcaaacagcacttcctccatggcaaacgatacattttcaaatgatacaaattcgcctacatgattgcggtttttctgtcctgctgccgtcagtaaaaactcatctgcgtaatcgagcgcttcctttatgaccgggatctgatctgcaaaaatacggcaggacaattttccatccatcatttcatgcagatgtcctaaaaatccaaatcctgtcacatccgtgcatgcgtggatctcatacgaatggcagatatgggaagctgatttatttaacatagtcatggatgcaaccgcctgttccatcgccgcgtccgatgcctctttcacgcggtttgcagtacagacgatcccgacgccaagttttttggtcaggatcaatttatcccccggtcttccctgattattgggataaatcttatccggatgcacggttcccataacagaaagtccatatttcacatccgcatcagcgatcgaatgaccacccgcaagcgttccaccagcttcaatgactttctcggatcccccgcgcatgatctcccccaaaacattcagatccatgctctcaggaaaacatacgatatttaacgccgtttttacctcgccgcccatcgcatagatatcactgagcgcatttgccgcagcaattttaccaaaagtgtatggatcatccaccatcggcggaaaaaaatcgagcgtctgtacgatcgccgtatcatcagagatacggtaaactgccgcatcatccttgctatcgtagccgatcaacagattctcatccgccagtcctttaggcagacgctctaacaccctgctcaaaatccctgctccaagctttgcggtgcagccgccacccttgcaaaatatgattttttcgtctttctgctgttccatctgcacgcctccaaaaaattattgcactcaaaaataagttcatcttcacagatacgcaatcctacctgtccatgcagctttttttcaaagcttatcccgccgcgatctccctcacagctttcactgcagtatccacttcctcttccgtatttaaatgggaaaagctgaaccttaccgccccctgcgcttttgttccaagtgcttcatgcatcagtggggcacagtgcgcaccggcgcggacggcgatctcatagtcctcccagagccagtcgctcacactgccggaatctatatctccgatatttaatgtgacaactgccactctgttttttgttgtaaaatctccataaatctttaccccggaaatgtctttgacgccgttataaaaacgctctgccagcgccatttcacgcccgtagatcttatcaataccggtcttttgcagatatcccaaagccgcatacaatccggcgattccatgtccgtttaaagttcccgcttcaagcagagccggcatttcttttggctgtgttctgctgtaactttggactccggttcctcctgcgaaaagcggccggatttccacaccttttcgcacataaatgcctccggttccctgtgggccaagtaatcctttatgaccggtaaaacagagtacatcgatcttttgtttctgcacatcgattggaaggactcccgccgtctgggcggcatcaacgacgaacagcaaatgatgcttttgtgtaaatgctgcaatctgctctaaatctgtcacatttccagtcagatttgacgcatgcatgattacaaccgctttcgtttccggctcatatgcattttccagttcatcgtatgcgatccgccccttagaatctgccggaagataggttactttcacaccgcgctgctccatcagatacaatggacgcaataccgaattatgttcacagactgacgtgatcacatgatctcccggttcaaacaatccctggattgcaatgtttaacgactctgtcacattggcggtaaacgcaatacgggatgcatcctccgcatgaaataattctgcaagccgctctctggttccataaatgatcctcgacgcatccagtgttgccgcatgcgctcctcttcctgcatttccaattgtatgaaatgccgccatgacggcatgttccacttccggtggttttggaaatgtagttgccgcattatccagataaatcatggttttacaatgtttcctgcctgtgtcattttttcagcgatgacatacatattcgttacacttcccacctgaagtttgtccgtaagaccatagtgattcagacatgtgccacaggttaaaatctctactccctgtgcctctaatgattttaaatcttctaacgtcggcgattcctcacaggtcagctttgcacctccgttatagaaaaggatggtctgtggcagcacatcctgctctgtaagtgcataaataaatcctttgataagtacttttccaagttcttcatcgccctcacccatatgatctgcggagatcacaacaaccgtgtttccatggatcgcatttggagcacagttttcttctttttctgtctctgccgcatcgtttgccgacagtgctgtgttccctgctgccgcctcttccccgatctccatcgtcactttatactgtccatctgaaatcttttctgactttacgccataacctttctggtttgccatctttgtcaggttctgaactgcgatctcattatccaccaatgtctccacaacacctgcaccattaagctctttaattgcattttttgtttttactaccggaatcgggcaggtatctcccattgcatttactgtaatcatagttatttccagcctttctgttctgatattccgttccacaaaaaaggacattacggatcactcctgtaacgccctcgttattttttcttaagtataacattattcccagagaatgaaaagatattattcagcgaagaactctatgcatttcaggtgctttccagcataaagagcgttatcatctccgtgcacactccccatctctccctaacaggatatccatcccatgttccagcgaatctaagatataagtcaggctctcctccaccgccttcggactgcccggcagatttacgatcagtgactgtccacggatcgcactcgcaccacggcttaacatagcgcgttttgtgatcgtcatgctgtaggcgcggattgcctccgcaattccgggcgcattccggtcacaaaccgcaagcgttgcctccggtgtcacatcccgcatggaaaatcccgtcccgcctgtcgttaagatcagattgcatttacattcatccgcaagatggatcatttcctgttccagttcttcctgctcatccggcagcactttataggatacgacctcgtagttttctgccgggagaatctctctgatccttcttccgctgatatcctcacgctctcctttggaacccttatcgcttgctgttataattcctactgtatatttattgtccatatcatgttttcctttcgtcctgttctaacacaacattgtatattttgtctttcagaaatctttgacacagctttcaatcgctgcatgattcttcacacacataatgcccgctcttgccgccatccttctccatcagatgaatatcagtaatccgcattccacggtccatcgccttgcacatatcgtaaatggtcaatagcgtcacactcacgcctgtcattgcctccatctccacaccggtcttcccgatacaggaagttttacaaaatgcttcgatcgaatgctcctcatcatgcatctcatagcggatctcacagtccgtcaatgcaatgatatgacacaacgggatcagttccgaatttttcttcgccgccatgatcccggcaatacgcgccaccccaaggacatctcctttttttgcggagtgtcccttgattgccgcatatacctccttattgacatatattttcccggctgccaccgccacacggtaggtgtcatccttcgcatgaacatctaccatgacagcatttccttccttattgaaatgtgtaaactcacccatacgcagcgctcctttcccaattcaacattttcctacactgctgtctccacatgcctgtacagacagcgccttcctatatctgtgactgctctatttattttctttccttattataaatagaacttctgcacacatgcaatcccaatttttttcctgtttttacctgttttggacatattttgttcattttttattcatattccatagaaaaacacagattgttcattcttttttattcatctttccgattgattttttacctgagaagcgatatattctcttagtgtcaaaaataagatttttacacaccttttacaaaatactggaaatgacagcatttccgtttacagatagacagtttgatattacatgaaactttgggaggtcactatgaaagaaaaattacagttttgtcttgataagatttctcttatccgctcaaaattaccaaagaaaaaaacgcacagcgaaaaatattataaaatgattgcatttttaaacaaatattccttagtatttcattttattttagcatgcgtgctgacgttcgcaattgaagtgatttcaagaagagatttcctttctaccatctctttcttacataatcacacactagcttacctttacaacgcatttatcgtatttgcttcgctctcgatcgtatatctgttccggtgcagggcacagctgcgtgtactgatcagcggtttatggctgttccttggtacgatcaacggtctgatcctttcaaaccgtgttacacctttcagctatactgatttaaaatgtatctctgatctgttcgcaatgcagaacacaaactactttaccgcagaagaggcaactcttgtcgttggcgttgtcgttgcatttttcgtatttttaggtttcttttttgcaaaagggccaaaatatcagggaaaacgtcattttgtattaggtccggtttcgattgctgctttacttttagtcggacttccgattactacacaggctgcacagggttctaacatccttgcttcctatttttccaatatcgctcagggttatgccgattatggttttgtatacggtttttccaccagtgtggttggccgtggtatgagcaaaccggatgattattctgaggaaacggtcgatgcgatcgaaactctggttaattcttccaaagaacagaccactgtttctaaaggcagcgaaccgaatatcatctgtgtactgttagagtcattcgcagatccttacgaagtaaactttttaaatatgtccgaagatccgatcccgaattttcacaatttagagagcaattactccaccggatatcttaccgttccggttgtcggcgcaggtactgcaaacacagagtttgaagttttaaccggtatgagcatgcagtatttcggaaccggtgagtacccttacaaaaccatcttaaaacagacagactgcgaaagtattgcatctgacctgtcaaagatcggttacgatacacatgtagtacacaacaataccgctactttctacagcagaaacaatgctttttccatgatgggatttgatacctttaccagtaaagaactgatgaacatcacacagtacacaccaaatggcaactggccaaccgatgatgtactggttcaggaaactgtaaaagctttggactccacaaaagaccagtccgattttgtatacacgatcactgtagaaggacacggcgattatccgaccgaaaagatcttaacagatccggcaatcaaagtttccggcgcagccacagaggaatcaaacaatcagtgggaatattatgtaaatatgatccatgaagtagatgatttcatcggtgacctgatcactgctgttgaccgccgcggtgaagataccatcgttgttatgttcggtgatcatcttcctaccatgggactttctgattctgatatgaaatccggtgatattttcaagacaaaatacatcacctggaataacatgggacttccaaaagaggatgctgatcttacagcataccagcttctctcccagatcacagatcaggctggtatccatgaaggaaccatgtttaactatcatcagacacagcgcaattccgagacatacttaaatggtcttgagaatctgcagtacgatttgctttacggcaaaagatatacttacggcggcgaggatctctatcctgctaccgaccttcagatggatgtggaagatgtcacaatctccaatatccgcaaaaattcagaccgcaatatcctggctgtttacggttcaagatttaccaagaatgcaaagatatttgtaaatggtgagaaagttcctactaactatatttcttctgcactggtaacaacaagtctggataacgtaaaagatggcgatacgatcagtgtaaatattctcggttcaaagggaatccttcttcgtgccggagcagacgaggttgtctatgaggatccagatgtgatccatgagacagagacggaagatccgaccgaaacaaccgaagtaccagtccctgcatccacatggaatctgaacatgccttcttcggaaaagacagacatgaaatcttctgaaagcacggaagtgaaatcttccgaaaatactgaggtgaaatcgtccgaaaatacggaggtaaaatcgtccgaaaatacggaggtaaaatcgtccgaaaatacggaggtaaaatcgtctgagagtactgaagtgaaatcgtctgagaacactgaagtgaaatcgtctgagaacactgaggtaaaatcctctgaaagtactgaaatgaaatcctctgaaagtactgaagtgaaatcttccgaaaatatctctgacacacttggcagatagctttattaaaaaatcaaaataacagacaagtccgatatgtggcaagatgctgctattgggcttgtttttttgcaaaataattttaattacattatgtcctgtgttaaaatggaatcaataaatcggagtttcaggaggaaaatcatgagcagtaggggaatttttattttagcgattacatggattgttatgtcaccgttttggttctgggcagaaaatattgcgttaggtatcatatggctatgtggcggagtcattgaactatttatcgcattagtgagacgcagcaaagagaagaaaagcaagtaaattcaagtttgtttgtgcattgatggttatcttgagcttaggaggcgtttaatgaaaactgtttttttacatgggttgggacaaactgcacaggactggaaaaaagtagtccaacaactatcaatttctgatgtcgattgcccagaacttttttcttcaacagaagatgaaatatcctattcgcagattttgggtgatttagaacagcggtattcagaagtaaaagagccgcttcgtatctgcggtctttcgttaggtgcgcttcttgcgattgattttgctattcgacatgaggaaaaagtggattcgctggttttgattggcgcacaatataaagttccaagtttactgatagattttcaaaatcttatcttccgttgtatgtcaaacaaggtttttgaaagtatgggactatcaaaaagcagcaccataaaattggctcactctatgcggtcattggattttactttgcaattaaataatattcgttgtccagtaacaattttgtgtggcaaaaaggatactgccaatctaaaggcttctaaaaggctaaaagaattgctaccccaagctactttgcacatcgttccaaatgcaggacatgaactcaataaatatgcaccaaacacgattgcagagatattaaatcagtaaatttatcgtgcaaaaaatatagtacgatgaattgtctgacaggtaagcgatctctttcactttcatcacaacatcccactgtccttagagagatggacgaagtataatgtaagcaacaatcggaatttgttactctttttggaggtgaattggtaatgataaaattaaaaatgtctattgaagatataagtgagtatcagacaggtattttaccaaagaatgctgttaaaatagaaacacctcagagcattgaagagatgatgaaaaaagcggcacctattgcagcggtattatgtattttaatgtttgtaacgatgctgtgtaaaacagttatgaacaagacagttgttatttcgcatgtatttattttgattggtttttgcctggggtatatttgtttggtgatacacgagtggttacatgggattgtctatccgagaaacgcactggttacgataggtaaaataacgggtaagatatcatttgttgcattagcatcatatcctctgaagcgaagaaggtttattgtaatgtgcctattaccatttgtgcttggaataataccattattgatttttattgttagtccggcagaatatagagaactaaatggactaatgtttggcatgtcatgtatgggtatggtttcgccatttcccgatgtatataatgtttttattgtcttaaaaaatgcaaataaaaaagatgcaataatgttttataaaaacgatatgtataaggtatcgtaaattccagtttattaggatgataaattttattttgaataggacaggtgtttatgaaaaaaagcgcgagcgcagtttctgttattggaggagccgatggaccgacctccattttttttaagaaaaatgcaaaacttactctaaaacagaaaattcaaagagcaaaaaataaaattaagcggttctatgtgaataaaaccctttcatgtgaaagtcatagttttgatgaagtaatagagtatatcgtaaatagatataggtttgctgaagtcgataaggatgctgaagaatttccagaagaatatcagcagatgagagcctcttttatcattcaatatgctccagaattattaggagaatctactgcatgtcctaaattaaagagcgaatcgccaaaagatgtggaggcttatatcaggcaaagcgaggagcgaatgcagagggcaatggaaatcccttcgacagaatttgatattgactttcataaattcaaaaaagcatttgatgatatcaatgataccatgtatattgttatcgaaaaaaaatatgcatatattggcggtggggctggtggaaataaaaaggtggataaaaactttcagagtatctataaagatgtatacagatattacggtgtcacaaaagaggataaagtaagcaaatcggaacgatataaggatgtggttcgaaccttgagtcagtaatacagttttgcaatcattcaagatatagaaaaaatctataaaaaaggagctgagacactgctgattttaatcagatagtgcgacagccccgagaccgtttcaagttttgtgtaaacgctaaaaactgatataagatttgtgaatagttacaaatgggcagagccgattttccggattctgcccatatctgcattatacaggagtttttgggcatgtcaataagacctgcccaaaacaagctggttttacaggttgcgtccgttcagacgctcttcaaatttctctcattgctgctttttgtgggctgtcttttcttcttgccataaaaataacctccaaactgagtaattttatcttacatcagtttggaggtttacacaaactttgggatgctcccttttaattagaatccgggaacgaaccatttttaaggcagcttagaatccagaaacatctggcaccgcctggtctcttctttacttcttcatcacacgcatcaggttcaccatctcgatcgcacccacagcgcattcatatcccttatttcccgccttactgcctgcgcgctcgattgcctgttcaatattgtctgtcgtaaggatgccaaacataaccggaattttgctctgtaaggaaacacttgcaatccctttggaaacttcactgcacacataatcataatggctcgttgccccgcgtatcactgccccaaggcagatcaccgcatcatactttccgcttgccgccatcttctctgcgatcaccggtatttcaaatgcccccggcacccatgccagatcaatctgctcctccggtacatcatggcgcttcaacccgtcaagtgcacccccgatcagtcttgacacgataaattcattaaacctcgctgccacgatcccaatcttaatgtcctctgcccctgttaattttccttctaaaacgttcatttttttatctccttttttataatgttgatgtcaggttgataccatagatacttaatattatatttatcctcttattcaaaacgaagcatatgccccatcttttcctgttttgtccgcagataaaacagatcatacggtgtcgccttcatctggatcggcacgcgctctttgatttccatgccataatctttcaactggtaaactttatccgggttattggtcagaagccgcagtgtttttacgccgagatcttttaagatctgtgctccaatataatactcccgctcatcccccgcaaaaccgagcgcaagatttgcctctaacgtatccattccttcctcctgcaatgtataggcacgcagcttatttaaaagtccgatgcctcttccctcctgccgcatataaagcaggattccgcggccttctttttcgatctgttccattgccgccgcaagctgttccccacagtcgcaccgaagggatccgaatacatctcctgtcaggcactcggagtgtacacggcacagcacatcctctccgtctccaatctcaccttttaccagcgcaacatgatgttccccgtttaaaatattctgatagccatacgctttaaattctccatattttgtcgggagttttgccactgctgcacgctccacaagcctgtcatattttttgcggtattcaatgat

SEQ ID NO: 5266 - DNA, 507 bp, Unknown
  gut microbiota DNA sequence
agcataaaccgcactcttttaatccggcaagacgcatcaggtcaacggttgcttctgtatgaccgtcgcgttctaacaccccattcttttttgcaagcagaggaaacatgtgtcccggtctgcgaaagtcttccggttttgcatcctcactgatgcaatgccttgctgtcataccgcgttcctccgctgaaattccagtcgttgtaccggcataatcgatcgatacggtaaatgcagtctcatggttgtccgtattgtcagttaccatctgcgggagttttaatttttcacaaatctcctttgacatcggcatacagatcaatccttttccataggtcgccataaaattcagattttctgtcgttgcaaactctgccgcgcagataaaatccccttcattttcacgatcttcatcatctgtcacaagaatgatctttcctcttttcaattcttccaatgcctgttccactgtatcaaatttcttcattgtacttcttcctttccgtg

SEQ ID NO: 5267 - DNA, 18349 bp, Unknown
  gut microbiota DNA sequence
cgatacagtcattttccagatttaccgtatctcccgcctttttgtatgcaagaactgtacactgcgccgtatgtgggatgacagacaccataaaagtggtctgtgtcgtttttgcaacggtaaggctgatcccatccaccgcaacagaacccttttcaacaatgtaatgcatgatcttctccggtgctttgatggaataacaaaccgcgatctcgtctgatttgacctcacagatcgttccggttccgtcaatatgtcctgtcacgatatgaccgccaaatctgctgtttgccgccatcgcacgttccaggttcaccggacttcccgccgctgcttctccaatcgatgacctccgcagcgtttcgtgcatcacatcggcggtaaaataatttttcccgaaagatgtcactgtaagacagattccatttacggcaatgctgtcaccaattttgatatcctctaatactttttctgcctctattttcagtctggcagaattgcctttccggtctgctgttatgatccttccgacctcttccacaattcctgtaaacaagttttctcccctccctgctttttacggtatgttcaaaaccttatgtatctgtttccctctcatttatttttcagttccccggcgatcagaatgtcctcccccacctgctgtaccctctgactgaccaggcaatacgcgtcatcgggataatccacgcctattcctgcaaccggacttttggcatctgctccgccaaacagtttcggtgccacatacgcatacacctcattgacgatcccggcttctaacgccgaccagttcagcatggcaccgccctcaagcaatacgctctcgatcccgtctgctccgagctgccgcatcagttcttttaaatccacttttccatccgcatgttctgtcactatgatccggcatccatatttctgatattccctgatcttcgcctcatcctgacagcaggttgcaatgatggtattctgctcctctgcagtctgcacgatccggctcttaagcggtatccgcaatgtcgtatcacagacgatcctgaccgggtcttttgtctgcggcagacggcagtttaacattggatcatccgcgattaccgtgcctgccccaaccatgattccggtcatttcatgccgcatgcggtgtacctgttctcttgccgcctctccggtgatccattgcgattttccggatgccgacgctatttttccatccagtgtcatcgcatatttcatccgcacatagggcagttttgtctggatataatgaaaaaatacccgattttggtactcacattcctcctgtaaaactccttccgtcaccaggatgccctgctcccttaactgccggatcccggctcccgccacaagcggattgatgtcttccgccccaacaaacacatggctgatcccggcttctatgaccgcctgtgtacacggaggcgttttcccgtaatggcagcacggttctaatgtcacataaagatctgctcctgccggatcctctcccctgctcctgcaatccgccagcgcttcccgctctgcgtgaagtccgccaaattttttatgatagccttccccgatgattctgtcctcttttacaagaaccgcaccgaccaccggatttgtctttgtccatcctctgccaagctctgcaagttccattgcccggcgcatatatctttcctgctgcatgaataccttccctttcctgcaagataaaatctgcaatctctgttgcttcatgacgatagaatacacgctccgggaatattctattgccataaaaagaagctctgaacacgatcgttcagagcttcttaaaaccggattttagggatttctaaaatgacatattttaaaaaccgggataccatgcgaaacttttttccgtttctgatatccggcaggatatctaatttttgcagcaataaaatacgcgctccgcgaacattctattgtcacaaataaaaagactctgaaataaaactatttcagagccatgtatgcattatcttaccaaccgtttaaaacgatcctttaaatcctgcttatccatatcttctttcatccagactatactgtcggcttcggaattacaccgaatcatgccttacggctcgtgggctataccaccggtagggaatcacaccctgccctgaagatcatattctatttttatgtgtctgagtataacacgctttcttaaaatgtcaatactgtttttcagaccaaattttactgcagcatataaataagtccaaaacagccggctccacagttacttgtaatcgctgctgatgcctcctgcatgtagatctgatcaaattttttatacttttgcacttcctctaaaatcatatctttcgtctctttcgaacaacccgcagatgttataaataagactttctgatcaatcggcgaccatcgcgccatctgcgcgtgtatatattttttataaacatcctgtgtatttccaaaaaagatcgctgccggtacaattttctttttgtgcaatgccagaaccggatgacactgcagcatctctgtcattttccatacctgcttatttaaaagtccactgcggtaaagctgttttgaactgtctaaaataaagcttgtctgtattttaggctgtattgcttccagactctgtaatatttcatccagatccttatttttcagcaccatattggctgcatgcataaccatcaggcctgtaccgctcgacaaatgaccggaatcaaacacctgcacatgggaaaatccggctgccgcctggcttgcattctcaaatccctttccggatcctgaagcaatactgatatgcagtacctgttccgcctcctcaagcagatttccaaaaaatgtctcatattccccgactgtcggtgcttccgacttggcatactgatctttttcaatataagacagcagactgtctgaatggatttccaccatatcctcgtaatgcccatattccgtatttacaaaataatgcatgaccggtattccaagctgccggatcacatcattcggcagatccacaacgttgtccgtgctgacgatcagcctttgctttttcttctggcccagaatacggaatccgtccatctcactgacttcatccggatcgatcatatattcaatgcgctcttttggcagataacggagaagcattgcctcaaaaaggattccattgatcggtttcgcaagataatcagaaaatcccattttacgatacttttcttccgcacctgacattgcatttgccgtcaatgcaataatcggcgttttgcggcagaatccaccctgctggttgcgcaccagatccatggttttttcaccatccatctccggcatcatgtgatccataaaaatcacatcgtaattattttttgccgtcagcttcagacattccattccactatgcgccaatgcaagctggactttggtttcccgaagcagttttttagcgacaagcagattcatatcattgtcatccacaacaagaacttttgcttccggtgcttcgaaactctttttataggaggatctctgatgtcttgatgaactgttgtaattgagatttccaagtggcgtggcatttacaattttctgcggaatcgtaatcgtaaatgtagaacctttctgataaatactgtcaaccgtgatctgaccacccatcagatttacaagctggctgcagatagaaagtccaaggcctgttccctcgattccttttgtgctgccttcattgacccgtttaaaactgtcaaacaggtatttcatatcatcctgacggattcccataccggtatcgatcacagccatttttaaaaggatttcgtccgctcccgtctgctcactctccacaaacagcgtgacggatcccttttgcgtatacttgatcgcattacttaaaatattggttaaaacctgtttgatcctcatctcgtctccataaagcatggatggcagtttttcagatacattgacacaaaattccagatttttctcatgtgcacggatccaggtcgtgtttacaatttcactgaataattctcctgtctcataacgcgccggaacaacttccatttttcccgcctcaattttggacaggtctaaaatatcattgatcagggacaaaagcatcttacttgcactctggatattattggcattctcaataatatcgtctgacagattctcctcccgaagtgtcatttcatttaatcctatgatcgtattgatcggcgtacggatttcatggctcatatttgcaaggaaacggctctgtgtattcattgcggcaactaactccgcctgctgcttttcattttcttttctctgatattcagagagtgtgatctggataaacataaacgcacaggtcagaaagatggttatgaccgcactcacgataatatccacataaactacggattctgattccatataagtgatccgttccggatgaacatatgcagtgtaaaaacaatacgcatccgcaatgatcgttataactgttcccgcgacaagactttttccccgcagcaggaaaaaaagcgagatgaaaccaagaacaaaccaaagcggcataccgctttttaagcctccggagcgcagaaacgtaactggaagaaaaattccattcagccctgacatcagaatgaaagaacagagatcatattgctggaatttctttcctgcccagaaaagcatgcccataaaaagcgccccggcaaataatgctgcgacattttttatctccattccctcggcaagcgtataaactccccccactgccatcgcgatcgttccaagcagcgacataaagcggaataactgtgcatgaattgaaacatctttccggatcagtacctggataattctgtcactcagcttactcattgtccgcacctccccatttttttaatgtttccgcagcactgataaaatcaaacagttcaatctgggcttccatatcagcgatcaactgtgtatccgaatccgccatcgaactgcccatctcattttttatcatctctaacagcttcattgcctctgcctggtcaaaattgtcgattgctgccgatagtttctgcactggatttttttcttcccccaccgtcacatacttagacagcccatcaaggatcgaacaatagtctgcgatcagctccgtatggttttgtatgatataattttcatccccatgctcacatgcctcctgcatcctctttgccctttttgaaagctcttttgcaccgatcgtaagactttgtcctttcagggaatgtacattgatcttataattttcccagtcttttttatcatacagctcctgtaatgtctggatctgacttcttccctgttcataaaaacactgcacgatctccatataatccgcttcattattgtcaaagtaggaaagcccaagccggcggtcaattcctgcagcctcaaattctttccttccttctttgaattgtccggataatccactgttttcttctgtcttgcaggtaacctgttcctctcccgtatctttttcaataaacatgcttaaatatttgcgaaggacacgttccatcgcagatttttcaatcggtttcgcaacaaaatcatcgaatccttccctgatcagcatctctctggctccgcctatggcgttggctgtcaatgcaatgatcggtattttccgttcacggaaccgcggtaattcatgaatcctgtgcatacattccacgccatccatttccggcatcatatgatccataaacacgagatcatagcttctgtcactgattttatcaattgcctcactaccgctcaatgccgtatcgatcgtgatgccataatggcttaacagacttgaaacaacttttaaattcatggcactgtcatccactgcaagaattttggctccttttacacggaatctgtcatgatgccaccgttcgtcgtatgcgtcctgctgaagtttttctccattcaaaatggttgcaaccgagaatacatgcatcgggcgatagataagcagaacttccggtccgattttttgcagatcacaatccctgtttgccatgacaacaactttcatttttgcagtcaggctgtcaaaataactttgatctataaaatattcgacatccgcaacaaacaaaaactgataattttcatgatcgatgcggttttttagttcatgcatggtcgaacagcgcacggcatctacatgaagctgatcgaccatcctctggatacattcaagatatccgtcacgaagctgtccgaaacggtatctctcgagatccatataaaaaatgatctttttatctccggcatcacgcacggatacaagcggcatatccgtcagtactctctgtggaatgataatagaaaccgtcgtccctgcatcaggaacactctcaatatgcatatgtccattcatttttgcaatcattttacgtgagattgcaagacctaagccaatgccccccgcacgccggtcacgggtcgtatctacctgattgtatgtgttttccagtgcatctatatttttttcgctcatcccgattccggtatctttcacctttaccataagattgatgccgtatgattccttgcgggcgccgacaaacaaaatgacaccaccggcatctgtaaatttgatcgcattgttgatgagatttaagataatgcgatatattttctgactatctccaagcaggttattcggaatatccgcctcacaatccacaatgatctcaagattcttttctttattccacacatgtgccatgttaaccacatcattgatcacagacgtaatgttatatggttcttccaccagctccatcgtgtcattttcaagttctgaaaaatccaggatatctgataccaaagacatcagattcctgcccgcaactgtaatatcatacagctgttcctttgtcgtatcatccactttcgcatccagtaattctgatccgattccgatgatagaatttaacggtgtacggatctcatgcgaaatatttgccataaaatcatcttttgcctgtttggcatcctcgagttcacgcattgtctcattgaattccatatcatgctgtatacggttttttaactgtttattttccatgatctcgagaataatgatcgcaaaaaactgcataaaaaattccatttcccgtatcggattatcataatttactttatctaacaggaatgtatcaagacaaaacaaaaagatcgttgctaccaacgaaatataattgatctcgatcagatcaaaaagagacaacatcacaacacttgctgctactgttgccatggtaagagacgaaccgtccgtgaataccgtatataaaataatattcatccatatcataacagaacaaaataacttcgccagtctgctgtaccgtcctgacagcatccgaagtccgatactcgccaaaagcccacaaattatcaccgcagctacccagcttggccattttaaataaactgctgccactaccatataaacagtatatatgaaataaagtacatacgggatcactcccgccctgtcctttttgatttctcttatcataacgtcccctctcattcacttatatctgtaatttcccgctgcaattccagaaatatctctgtaaggttcggatcaaactgagagccgctattttcctttataatttcaaacaccttagatgcgggacggattgctttcttataacaccggtcctgatataatgcatcaaaaacatcagcaagtgccatgatccttgcacataacggaatctcctccccggataatccatccggatagcccgtaccgtcccatctttcatgatgatatcgtgctatttttctggcaatatccacatattcctcatgttccacatttccgatgatccggtcaatgatctcacacccggctaccgtatgctgtttcatgacttcaaactcttcgtccgtcagccgtcccggttttaaaagaatcgcatctggtgtttttatttttccaatatcgtgaagtaccgatgcctttactgtattgagctcataattatgatcaaggatatccggatacatccccttttccctcaacgcttttgtcagtatctgtacataattctgggtattttttacatgaagtcccgtactgccatcacggctctcgatcaggttggcgataccggtaatcacttcatcctgcatacgcgtcatttccgcaacctgcgaggcgaccatctcttctaaatgattctggtactgtctgttctctaaaattcgtttcacacggctgactaatacctgggaaacaaacggcttcccgacaaaatccatagcccctgcctcaaaacattttgtttctgtttcagcatcattatcaccggtcagaaacacaaccggtatcatagatccattttcaagttctcgaatctttttcagtgtttcaaatccgttcatttccggcatatttacatccaaaaggatcagatccggtgtcacttttgaaagaagtgacaatgccattttcccagatgtagtcgcagaaatacgaaattcttcccccagaatcgtctgtgctcttttgagattgcccggatcatcatctaccagcaggatcagttctttgttacttgtctgcatacgtttctcctttgtaaaaatctgaattgcccgactcctttacacgtaggaatgatctactttgataaccacgtaataattatttccaagacgttcccttacctgtgatgtaatacgtgctgccagctcatcatcctgtatctgaaacttatacggtatcaggacatcaaatataatattcgtatgtgtcggtcccgttacaacgcggaaatcatgcatattgatccgctcatcaatccccttgataatagatattaccgccgctttcatctcgctgacatgttcatccgatgtcacgatcggatccatatgtatcgtcgcatcacagcctaacttttcttttaattcattttcaacattatcaataatatcatggatctctaagatattgccctccgcaggtacttccgcatgcagtgataccatctgtcttcccgggccataatcgtgtacgatcaggtcatggattccacagatctcctcatgtgccattacgatctgatcgatcttctgcacaaattcctcctccggcggctgccctaaaagcggatttaaggtatctttcgcagctccgatgcccgcaaacatgataaatacaccaactaatgcaccacaatagccatccacatagattccggtaaaatgtccgatcaaagctgccacaagtaccactgctgttgcgcaggtatcgctcagactgtcggttgccgttgccttcatggcagcagagtcaattttttttgcaaccccactgttataaagatacatatacagttttacaagaatcgaaataatgaggatcacaaccaccattacggaaaactctgtttcttccggatgaatgatctttataatagaatccctgatcagttcatacgccatcagaaggattgctgccgcaacgatcagtcccgatacatattcgatccgtccgtggccaaacggatgctccgagtccggttttgctcctgccagcttaaatccgatcagcgtaacagcggaagatcctgcatctgacaggttgttgaatgcatccgcagtcacagcgatcgaatggctgatcgttcctgcaaaaaatttgccacagaaaagcagaatatttaaaaagattccgaccataccgcagagaataccatactcctgtctgatctttcctttatcctctttttctttaataaaaaactttgaaagaaatgttatcatgtctgatccccctgtgtccgatctcatacaatgcctgtttccaaacacttccatttaaaatctatgcatttttgattgctatctgatttttccgatgtcctgcagcggccagtaaatgacctctcctttaccgaggattttatcgatacttacatatttgttatcccagtaacgcgcgtcccaggagtcattccggttatcccctaataccagataacagtcatccggtacttcaaataaatatggtcctgttgccaccgtccattcttccttcaaataatcttcctccagcggcgtttcacttccatcaatataaatctttccatcgtcaatgcggacttcctcccccggcagtccgatcactctttttacataaagttcttcctcatcatccggataatggaaaatcacaacatccccacgctccggtgtatcctttaaaaatgcgagacgatttccgatcaggcggtcccccggcatgatcgtattttccatggagcctgtcggcacatctgcgttgatgatcagataattcttgatcagaaatgctgccccgatcgccagggcaaatgtaagtacccagcttaaaatctcgcgcgatgccgacgtgcttttctgtgcttcctctttttctgatccatccggcttatcttttttatttgatgtatcggccttatcccgtgtattggttttattttgtgtatcttttttattttcatctatatccatcccgatatcctgtcttttcgcttccatctgtgtcctcactttatgccataatgatttcttttatgttaaaagattataatgcattaaatgtaattttagcacacttgccacaaaataaaaagtgccacaccatacgatgtgacacttttttgcctgtttttgtctatgatttatttttaaggctattacctgtttttcaggcgatacgctttctttagtctgcgaataatgctgtggagtaataacggtcaccactgtccggaagaagggcaacgattgtttttcctttgttttccgggcgttttgcaagctcgattgcagcatataaagctgcaccggaggaaattccgactaatacaccctctgcttttgcaagctcttttccggttgtaaatgcatcctcgtttgctaccggaaatacctcatcataaatcctggtatctaatacctccggaacaaatcctgcaccgattccctggatcttgtgagaacctgctgttcctttggaaagaacaggagaagtctccggctcaactgcaacaacttttacatctttgttctgtgattttaagtactgtccgacaccggtaactgttccgccggtaccaacacctgcaacaaagatatctaccttaccgtctgtatctgcccagatctccggtcctgttgtctcgaaatgggcctgtacgtttgccgggttggtaaactgggatgggataaagcttcccgggatttcttttgcaagctcttctgcttttgcgatcgcacctttcattccctttgcaccctctgttaaaacgatctctgcaccgtatgcttttaagatgttacgacgctcaacactcatggtctccggcattgttaagatgatacggtatccttttgctgctgcgatagaagcaagaccgatacctgtgtttccggaagtcggctcaatgatcacggaaccttcctttaaaagacctttctcctctgcatcttttaccatgtaatatgcagcacggtcttttacacttcctgatgtgttaaaatactcaagttttataagaacttttgcctcaagtcctttgcttttctctaattttgttacctctaataaaggtgtgtttccaatcaaatctgttgcactctgataaacttttgccatgatatccctctcctattctgaaatttttcatttctgaagtctgcaatgctttttgcagacttcaaagtaaaaataaggaacttatttctactttactgccttaaatgcttcatcaagatcctcaatgatgtccctgatattctctgttccgatggaaagacggatcgtgttcgggtagattccctgctctgccagctctgcctcatttaactgtgcatgtgtggtagaagccggatgaatgacaagtgatttcacatctgccacgtttgcaagtaaggaaaagatctcaagattatcaataaaatcttttgccttctgctcatcccctttgatctcaaaggtaaagattgaaccgccgccgttcgggaagtattttttgtataattcctgctgttctttatcctctgtaacggatgggtgatgtactttttccacctgtggatgattgtttaaatactctacaacctttaatgcattttccacatgacgttctacacgcagggacaatgtttcaagtccctgtaaaaacataaatgcgtggaacggtgaaatcgttgctccggtgtcacggagtaagattgcacggattcttgtgacaaatgctgcagagcctgctgcctgtgaaaaactgattccgtgatagctcgggttcggttccgtgatggcagggaacttaccggatgcctcccagtcaaattttccactgtcgacgatgacaccgccgattgcggttccatgtccgccaatgaattttgttgcagaatgaacaacaatgtctgcgccgtattcgatcggcctgagcagatacggggttgcaaatgtattgtccacaacaagtggaattttatgcgcatgggcgatctttgcgattgcctcaatgtcgctgacatctgagtttggatttccaaatgtctctatgtaaagagccttggtgttgtcctggatcgctttttcaaaatttgaaacatccagcggatcaacaaaagtagttgtgattccatagtccggaagtgtatgctctaacaggttataggaaccaccgtaaatattatttgctgcaacgatatgatcgcctgcatgtgcaaggttttcgatcgtgtatgtgatcgctgctgcaccggatgcaactgcgagtgcggcaacaccgccctctaatgctgcaattcttttttcaaatacatcctcggtcggattggtaagtcttccgtagatgttgcccgcatctttcaggccaaaacggtctgctgcgtgctggctgttatggaatacataggaagaggttgcgtagatcggcactgctctcgcatctgtaaccggatctgcctcctcctgtcctacatgtaactgcaatgtttcaaaacccagatttctttcgctcaaatgtttctttcccatagatcacttctccttcatttgatatttttctagtattcttcttcctcttctttttcgctgatatcatttaccggacgctctagtccttcgattttgataccgtttttctctgcataatcccagagtgctgcatggattgcttcctctgctaacagggaacagtgtacttttaccggtggaagtccgtctaatgcttccataacggctttattggtaacttcaagtgcttcctggatcgtttttccttttacaagttcggttgccatactgctggttgcaacggctgcaccgcatccaaatgtcttgaattttgcttcctgaatgatgccgttatcatcaatatcaagatacattcgcatgatatcgccgcattttgcattaccaacggtacctacaccgcttggattttccatctctccaacgtttctcggatgattaaaatggtccattactttctcactgtacatatctgatttctcctttttatctctttacgctcaattttcaatcctgattactggttctgtttttttacaaaatcctcatataatggggacataccacgcagacgctcgataatcttctttaactcgtctacggtatagtcgatctcttccatcgtgttcttctcggataaagtcagacgcagggaaccgtgtgcgatctcatgcggcagaccgattgcaagaagtacatgggacgggtctaaggaacctgaagtacatgcagatccactggaaccgcagatacctgcctgatctaagaggatcagcatggactctccctcgataaaacggaagcagaagtttgcattgttcggcagacggtctgtgcggtgtccgtttaatctggtataagggatctcttttaatacacgctcgatcagatgatctctgagtgcgatctcttttgcactgcgctcttccatattctcttttgcaagttttgcagctgtaccgattccgacgataccaggaacattgtgtgtacctgcacggcgttttctctcctgtgcaccgccgtggatgaaggaacggattttaacgcctttgcggatatacatcacaccaataccctttggtccgttaatcttgtggccgcttgcgcttaacatatcgatgttcatctcttccacgtcgatcggaatatgtccaaatgcctgtaccgcatctgtgtggaataatacgccgtggtcatgtgcgatcttaccgatctctttgattggctcgattgttccaatctcattgtttgctgacataatggaaattaagatcgtatccgagcggatcgctttttctaattcctcaaggctgatctttccatcctcatcaacatccagataagttacctcataacctttctgctctaaatatgcacaggtgtgaagaatcgcatgatgttcgatcctgcttgtgatgatatgttttcctttggactcatatgcctctgcggctgcctttaatgcccagttgtctgactcgctgccgccgccggtaaaatagatatcctcggttcttgcattgatgagcgctgcgacatttgcccttgcctcatcgacagcctttttgctctcccctgcgaaagaatagattgcagaagggttgccgtagtattctgtaaaatatggaagcattgcatctaatacttccggatatacctgtgtggttgctgcattatctaaataaattaattttgccatgatatcgttcctttctttatccttatcttatccattttatatgctgctcatactagcggaaagtccgtatattctgtgtgtatccatcaccattctgtttcatttcctagtttgttgatatgatataagtattatacatcatcaattcctattgtcaagataggaattgcatttttttgtgcaaaaacaagaacaatccgtttccctttaaatcaagtgacaaccctcctatataatgctataataaatcgtcaaacgcaacaaatatcttaatattctgacagatgatattttgcagtaaatgttttacaaatagaatttaatgatgcctcaaaatcgggggcaggaatggagactattatgaaccagttattttcaccggaactgattccggattatatgcacgcacacccggagtacggggtaaaacgtattttgacctacacggtctatcgctttttatcctttgcaggaaaagaggatgatacacttgccgcttatataaaagaaacgttatttccaatggaagatgcactcgacttttccctgatcagcgattatctggctctggatccttatttttgtccgataccggaggaggacagttttgacgcctttttcttatataccgcaatcagcatcttagagaatgcttttgacgaatttgcattaggcgatgagcttgccatcattgatgacctgattctgacaaaatatccggtacttggctctgttgctttagacgatgctgatatccgtctggatgcgctgatcggcagcggtgcggagttttatgccgttttatatctggctctgacgagatatccgtcagcactcggttcactgcttccacagtttggcaccgcctaccatgacagttaccagttcaccggcgacgacacagcgctttacgatttcatggatgaatattttgagacgaaaaactgtatgctgcagccatttttcgtggaactttccaacacgcttgttgacgcaacactcggctattacaagactgaccttgaaacattgctcgcagccgaagtcccgggacttttaagtggaacggcttcccgctttgccgtgcagaaacgtttcggtgcactcggactcaccagactgccggaccacgatacctgtctggcactgttatccgaatctttccgctatgcagcactttatgaactgcgcagcaacctctttgattaccaccttgaagaagaccgtctggtgactgcggacaactggaaagataccatccgttttcacttcgtgcagtatcagcatatttatgagcaggcactcgacggattttatgcggctgtgctttccagaaagctgctgcgcgcagagttttcggaggaattaaaaaaactggagttctagtcccccagtttttttacgagaatatatattctgatttattctttttcttcctcttccggttcccgcaggtcgcgtatccttacctgctcgatccgtttgccggacatctctgtcacttctatctcaagtttaaattcttcatccgtatgaaaatctccggctttcggtatacattcaaacagttccatcacccagccgctgacggtctgcacatcaaattctgcctcgcggtctaaacattcaaacagtttttccacttttgtttttccggcaaccagatattcattgtcgctgatgcgctcaatttctgtctcgaccttatcgtgctcatcccagatctcaccgacaagttcctctaaaatatcttcaagcgtaatgattccagccgttccgccgtactcatccatcgcaaccgcaatgtgcagttttttctgctgtagttcgcgtaaaaggtcatcaatttttttatttttcggcgtaaaaataaccggtcgcactgagtcacggatcgtcacatccgaacggtaaataaagttgtaaaaatctttctgatataaaataccaatgatctggtcaatattttcctcatagaccggaagtctcgaatatccggtgtccgcaaatattttggcgatctcatcttttggcatatccaccgggataccgacaatatcaattcgcggtgtgtaaatgtccactgcctccagctcatcaaactcgatcgcgctgcggatcagtacacgctcatcttctccgataccgccgcctgcctgtgcctcatccacaatggtgagcagttcttcttctgtgattcccggctcctcttctgacttaaagatgtgtgacagcagttttttccactgtgcaaacacaaaattaaccggtgtcaggatttttaccagaacagcaatgatcggtgcggaaaacagtgcaaatttgtccggtgattcttttgcaatgctttttggtgaaatctcaccaaagatcaaaaccagaaccgtcgtaacgatcgttgaaacactggcccccttcgcatccccaagcatttttacaaacaggatcgttgctaaggaggaagataaaatatttacaatattgtttccgatcaggatcgttgacaacaggttgtcgtacttttcttccagttcaagcaccagcgccgcccgtttatttcctttgtctgccatatttttcatgcggatccggttcagcgacaaaaatgcggtctccgtcgccgaaaaatatgctgacatgatcaggcatatcgcaataatgataaaaaacaatgagtcacttcccataaaaaaataattcctctctttccacgcaaaaaagcatagctgcacctgtttgtctctccaaacggcagttatgctttctcatatttcaatattgatcttttcattttgttattctgattcgggtaaggatccgcgtccccgtccgcactgtctaacatagtactctccatttctgcatgtgaacaatattacctttcacatgattttcatataaattgtgctatggatgtattatatcaaaacgcattctgcatagcaaggaatttttatccattttccggttctgtacccgctaaaatacaaataaaatttgctgttgtctttgaattatgatatactgttataaatatattttaagcggggcacatttcccctgataggattccgtttcctgtcaggggatcatcctatagacagaaaagaggtatttttatgcaggttaacgaatcatctgagaactatttagagaccatcctgatccttagcaaacgtaatccggtcgtacgttccgttgatatcgctgaagagcttggttttaaaaaatcaagtgtcagcgttgcaatgaaaaacttacgcgagaaaaataatatcaccgttaccaaagaaggatatatttatctgaccgattcgggtcgtgaaattgcagaaatgatctatgaacgtcatgaacttttaacagactggctgacacgtctcggtgttgatcccaagatcgcagccgaagatgcatgccgcatggaacatgtcatcagtaaagaaagttttgatgcgatcaaaaaacatatcaaataaattgataca

SEQ ID NO: 5268 - DNA, 958 bp, Unknown
  gut microbiota DNA sequence
atgtatcgatgaaaaatatctaacattaaagatgattaaggatgtgatcgatggtattactacaccggaggatttaattcagacgcttgtagagttaggacttgaggaggatcagagtgttctatgagtaaatacagtatagagcttaatcggattttttgtgatttggaaaatctattttgtttaaatgaggctgccaagagtgggcagccttacaaaataggaagtatagatgaggtgcttgattttagtttgaaagaagcagatagtctaccacaggctgcaattaaagatttgaatgtgagtgttagtaagaaggcagttctattagcttatacaaattctcgtatgaaattctttgacaagaaggaagttgatttttctaatatgccgtgcttgtatgatgttgcatcagttctttttaaatttacagcaaaaaaatcaataacatcagatacttttacggatttggataaatgcattatggtgttggaggatatggaaaaaacaaaaggtaatgttaatacgcttagttatagattgctacggatttttgtattgtgcgtatgctacggattgttatgtaatgcaggtattgtggcagattttgcactttcacagatgattgcgaaaaacgtttaatatacgggaggtgattgcttagtatggaatatagtacagctgttacgggaaatgcgaatttaacaattcaaaatattcttgattcaaaaagagaagagttgttaaagacaggtaatcctttatgtgtgcagtttaccttggatgaagtgaatgaattagctgatgttaattctttacgagaatacaaattaagacatactttcccagaaaagtatgagtgtactaatgatttgtttctttgtgcacagaaaatcttagaaggtgaaaataattacagattacttgagttctgtgctttgaaaaatagggtacttat

SEQ ID NO: 5269 - DNA, 193 bp, Unknown
  gut microbiota DNA sequence
ttttcaaataatggagcataagaggccaatgttacgatatcctgatttttctcaatacccataaggaaagccgcttctcccaaagccgcatacaactgtcccatatagttgccttcgtttacagccacctctcctacaaagatttttggtcccttacgatcgtagtcatcataataatttacacgttctgcaa

SEQ ID NO: 5270 - DNA, 2007 bp, Unknown
  gut microbiota DNA sequence
ataaagtttaaatgcattctcaccggaaagaacctttacgccgtctgcttccatctgtttttccatatcagaaaggatggaaagtccctgatcgatcgtttttccaaatttttcttcttcctgggataatactttaaagataaaatcttttttctcttcaagttccggataaccatccttgctctcattgattacggtagcagccagtttcgccatgaagataccgtcaataccgagcattcttccgtgtcttgccgcgcggcggatgatacggcggagtacatagccgcgtccctcatttgaaggcatgataccatctgagatcataaacgttgcagaacggatatgatcggtaatcagacggatggacacatcatctaatgcatctacctgatactttttgccggacatctcacataccttgtcgcggatcgctttcatggtatcaatatcaaatacggaatctacatcctgcatcacaacagccagacgctctaatcccataccggtatcaatgtttttctgcgcaagctctgtgtaaccgcccttaccgtcgccctcgaactgggtaaatacgttgttccatacctccatgaaacggtcacagtcacagcctactttacagtctggtctgccgcagccatatttctctccacggtcataatagatctctgaacaaggaccgcaaggaccagcgccatgctcccagaagttatcacattctccggtctccggatcacggtaaaatcttgtgatcctctctgccggaacacctacttctttgttccagatctcgaatgcctcatcatcttccccataaatagacggatacagtctgtcctcctcaaggccgagaacctgtgtcaaaaactcccatgaccagtggattgcttcatgtttaaagtaatcaccaaatgagaaattgccaagcatctcaaaaaatgtcaggtgacgtgctgtcttaccgacattctcaatatcaccggtacggatacacttctgacatgtggttacccttcttctcggcggtatttcctgacctgtgaaatatggcttaagcggtgccatacctgcattgatcaatagtaaactgttatcattgtgtggtaccaatgaaaaactcttcatcgcaagatgtcccttgctttcaaaaaacccaagatacattctgcgcaattcattttctccataaaacttcttcacgacaagttcctccaacgttgtataaattatttcatgccctgtctttttgcagggtcacgacggcattattcttttccggcatttccggaagctgcagtgtcttttttcgctttgcttttctctgcccattttctgccggcaaatactccagcaactgcaacagctgcaagaattaccattattaacacataatgtacaaaccatccaaatactgccataaatacccctgcctttctatcttctataacttattcagtataacgcacttttttcctatgagtcaagcgttaacatgttactattcactcgtacctcgttccagtaacggattttgccgatgcttcgcattccaaatcggcaaaatctgctgccaccactgtatcatacggcattttcagttcagaaaatgcctgcctgtgaacagtagcgttaacactactgttcctcaatcaggaaaacctgattttcatgtgtgatttccaccacacgctccgccatccccggattccatattttctttttataaaccgggatatgtgaataatcctgccacatatgcatcgggaacacatattctgctgacgttgtctctaaaaagtagtccatgccgagttcctgatctgcaccctgtctcggatccatcggaacaaatgcaagattgatcggttttcccgccagttttttgatctgtgtccggtattctcttctcatcctgccgttgatcagatctcccgccccttcccatgtccagtcgtttaaatcacctgcatggaaaaatgtagcaccgtgtgtctctacataaaa

SEQ ID NO: 5271 - DNA, 459 bp, Unknown
  gut microbiota DNA sequence
gctcttagcctcatcaaacacatcttttgcagtcagttccgggaagtttctaaggcttgtctcatcgttggtcttagcaagttttctctttgccacacgaacgataccggttgcggaagtatactgctctaagcagccgtactgtccacaggtacatgcctcgatctcatcatgatttacggtgatatgtccgatctcaccgcctgcaccattaaatcctgcaacgacttttccatctacgatgataccgccgccgacaccggttccaagtgttaccatgataacgtctttacagccttttgctgcaccctgccacatctctcctaaagctgcaacgttcgcatcatttcctgctttgactttcagacctgtcagatttccgagctcttcctcaacgttaacaatgccccagcctaagtttacacagcggtttaccacaccattactcttaaccggtcc

SEQ ID NO: 5272 - DNA, 1396 bp, Unknown
  gut microbiota DNA sequence
ttcttttcactcttctttctgaacttaccatctcctacagaaagtacttcatctaaaattaaaatttccggttcagctatcgttgcgattgcaaatcccaactttgatttcatacctgatgaatagtttttaataggtacatccataaaatcctctaatccggaaaactctacaatctgatcatatttttcttccatgtattgacgaccatatccaagcactgctccatataaaaatatattttcccggcctgtatagttcttatcaaatcctgctccaagctctaataatggtactatttttccatttcttattactctgccctctgtgggtttaaatactcctgcaaccactttgagtaacgtactttttcctgctccatttagtccaagaattcctattcgttctccttcatgaatactaaaattaatatctttaagtgcccaaaactcatccttctctaactttttacctttgagcattcttattacatattcacgaaaatcattcactcgttctttacttagattaaatttcattcctatgtgttctacacgtaataattcctttgccatcttaacctctatatctgcaaaataaaatcatcctgttttttataaaaacaaatcacacctaaaatcaacactacaatagaacatactgctgcatatgccgtcaaccccatgtccatagcttccccaaacattgcattacgaaaactctggatcatacaatacaacggattccattttaaaatccacgcatacccgctgttcattaaacgttccggataataaaaaattgcacttgaatacataataagcattaaaagcacttcccatatatattccatatcccgaaagaatacattgatcgttgtcaatatcattccaactccaaatgttaaaataaaaagaagtaacagtgggataattgcctcaatgatatgccatgtcacagttacattacaatataccgccaacggaaccattacaattaacgaaatagcaaaaatcacataattatataatacacaggatagcggatataaatatttcggaatgtataccttttttatcatcgctgcatttaacctgatagatttggatgctgttttagttcccgttgcaaaaaaagaatataccagccttccacataagatatataatggaaattccttatcattatttccaaacaacgttccaaatacaattgttaatacaattgtggttaatatcggttctaacatagaccataaaataccaagatacgaacgacgatattttaatttaattcccttttttaccagctcatataacagaaatcgacgattccaaaatgtcttcacatgtttcttattaatactcatcctctaatttccttttctgacactata

SEQ ID NO: 5273 - DNA, 349 bp, Unknown
  gut microbiota DNA sequence
atatatttattttcttatttctaaatccatcaaaaataaccaaaaggcaagagatctctcccttgcctttttcataggccagccatattacaactcttccgtcttatacgtgacatatccctcataataataactatggtcaatgcctttcatataaacttccaggtcattaatctgatcggtaagtgctgcctttaaaatatatttaatttcaatatctttgatcggactgcgttccatcgccatcagatagtcttctttttctatcttactccagtctactacctgtccgatctgtttttttaacatcatatccagccagatgcgcatgcttcttccatttccttca

SEQ ID NO: 5274 - DNA, 3297 bp, Unknown
  gut microbiota DNA sequence
tgttattttggggcagtgatcggacgtaatgcaaacaggatcggcggagcgaaaattgttttggatgacagggagtatccgcttgaaaaaaatgacaatggaaacaacctgcacagtggaaaaaatggttttaattcagtcatctggaatgtggaacagcagaaagaagatgagattacattttcttatctgagtaaggatttagaacaggatttcccaggaaatatgactgcaaaggttacatatacagtaacagatgataatgcgctctcgattgcctatgaggcggtttccgatcagaccacagttgcgaacttcacgaaccacgcttattttaatctgaatggtcatgattccggatgtatggaaaatcaggagcttgaaattttagcatcctattatacgccggtaaaagatggcgaagcgattcctaccggtaatgtggaaaaggttgccggaacaccgatggatttccgcaaaatgaaaaaaatcggtcaggacatcggagtagattttgaacagcttaagtttgtcggtggatatgaccacaattttgtgttagataaggctgatgggacaatgcagcttgcagcccgcgcaagatcagagaaatccggtatctgtatggatgtctatacggactgtgtcggtatccagctgtatgccggaaatttcattggaaaacagaccggaaaaggcggtgcatcttatgattcccgccacgcattctgtctggaaacacagtattttccgaatgcagtgaatgaaccgaattttaaatccccggttttacatgtgggagaaacttatcattctcagacaaagtattgtttttctgtgaagtaacaggcagtatgctcagacgtagatctgtcagcatgaataaaagatgatgtataaaacagtgccgcatctatttgaagaattcgatgactgccaatgcgtttgaggaggatcgcaagcgtgcacttgaggtaggtatggatggttatatcgcaaagccgatccatatggagagtgtgttagatgcgctgcaggaggggcttgcagggaaacattgaaagaaaactgattgatacgaattgacaatggttatgtatggttatattatgaatataaccatacataaccatttttgatgcataggagtatgagattgcagatggaggaatagaatacgaaatccgaaagatcgtatcagagagatagataaccggttagaacaactgccgaagggaacactgacttataagaatattaacggtaaaaaacagccgtatatccagcggacagtggagggaaagtcagtcagctgttatgttaagctatcacagcgggaacaggtactggcagagtttgaagaacggggaaagctttcggaagagaaaaagcggctgcttgcgtatgtggatggactgcagaatattttaaaacgaaatccatatctgaatgcgggagtcgggtgcggatatcaggattttaaagattttgcatgtggcagacagttttatgtggataagacacattttattgcagaatgggtttacagggatgcaaaagtcacgctgatcacgagaccaagaagatttggcaagacgacacttcttagtacagttgagactttttttgatccgagatttgcagaccatccggaatattttgaaaagttaagggtctgggggataaagagatccgaaaactgtttggaatggttcctgttatttccatcagttttgggaactgtaagggagcagactataaacaggcggtaaaaggaattgcagacagtttttataatatgtatgaagcacacagatatctgcccagactggaagcggaggatctaaaggaatataagagtctgagagaactgttccgtgcgggagataccggaaggattgaaattgcaatacagaggctgtgccgtctcgtctatctgcactaccagatcctgccggtcattttagtggatgaatatgatacacctctgcttgaagcatatacggatgggtactggagtgagatgatcggtacctgtcgtcagttatttcacagtacatttaaggaaaatccttactatgcgagggctttgattaccggagtgacgaaggtttcaaaaaattcgctgttttcggatctgaataaccttgaaacggatacggttacctgcgaggcttacagtgattgcttcggttttacggaacaggaagtaatggatgcattaaagtgccagaacatggatacgatgcatgatgtgaaagaaatgtatgatggatttatttttggaaaacaaaaagatatgtataatccgtggtccatctgtaattatatgaggttcggggaattgcagtcctactggatcaataccagcagtaacaaactgatcggggagatcatccgcagacatcctgtgcgtagcaaacatgagattgaacagcttatggcaggggaaatcattcataaagagatcaatgaaaatatcacgtttcaatatcttgacggtgacgagaacagtttttggtcactttttctggcagatggctatattaaagcggaaaatgttgtaaagcagggagagagcacatggtgcgatatgtcggtcacaaaccgggaagtgatgggaatgttccgctatgaaatccttgcgatgtttgaaaatggaaatgccgtttataatgattttacaaaagcactgctctcacaccgcatggaagatctgaatgatattttgctggatattgcatacacttccatgagttattttgatgttggaaaatgtcccccggagcgtacaccggaaaatttttatagtggactggtgttaggactcatcgtatctctgcgggatcaataccggatcgtatcaaacagggaaagcggacaggggaggtatgatatcgcaatgtatccgttagagagaaataaggatgcatttatcatggagttcaaagtgtttgatgcgaaaaaagaacggagtttagagcagacagccgcgaatgcattaaagcagatcgaagagaaaaattatgaggcggatctgatcgcggcaggcatcggacggggacaaatctataaacgttactgttcagaggtaaacttgtaacaaaagaaccgatggtagagactaatcgtagtcaaaaccatcggttttcttatgcaaatatttctgcaatctcgcggaacagattggtctgctctttcctgcgcatcaaaaccagcatgctcatgcatttacagagatggtcgatgcttgacggactccggaatgacacagcctgcgcctgttttcttttatat

SEQ ID NO: 5275 - DNA, 2571 bp, Unknown
  gut microbiota DNA sequence
atgtttcccatctggcagaaatctgcggacagtcggtatttcagtggagagaagctgtcatgtattatgagaaccggtgcttaaagcatgaactcgaagagggcgaagatctgttccgcggtgtggatcaggcgggtgtagatgctgcagcagatgccctgcgtgatatatacaaaaaacttttggagagcacgcaggcgatgccggaaacgaaaaaacagatgcagcttttatccgtgacattgcaggggatcggtatctggaatgccgtaggactcctgacagaaagcatggaaaaaacgggaagttttgatatgcagaaaggtctggaactggcagaaaagttagaatgctggtttatggcttataaagaaaactggagagccaccagcaaagaaggcgatctgcatcatattgcagagatcgtgttctggtatgcagactggatgcgcagaaaatgataaaaaagtataaattctatcaggtgataactgattaatcatcaggacttttcacgggaaatttatgatatagcatattgtctgctgccggaatcataagcaaatgagaggatacaagaataaatctcaatattttccacatactaactccaaagctgatatataagaaagagctgctttatcaaaatatagcattggaggataacaacgtgaaagcaacaggaattgttcgccggatagatgacttaggacgcatcgtggtaccaaaagagatcagaagaactttaaggatccgcgagggcgacccgcttgagatatttacagaccgcgagggggagatcatcctgaaaaaatattcgccaatcggtgaacttggacaatttgccggggaatatgctgaaagcctggcacagactacgggatatcttgttcttgtgacagactgtgaccatgtgatcgcagcatccggaagcgggaaaaaagaatttgaggaaaaaccggtcagcagacagttagaggaagcaatcagtgaaagaaagaactatcaggcatccgcgggagatgcggaatttatgaaagtgacgttagatgatgccggggaatatacagaacaggcattcagcacgatcatctgtgagggagatgcgatcggtgcagtgatcatctgcaataaggatgagaaaaagaaaatgaatgataccgaaggaaaacttgctgcggcggcagcatcatttttgggacggcagatggaacagtaaaataaactcagagatgagaagaggcgggaaaatcaaaaaagcaaagattttcccgcttttaatatactattggaaaaacaaaaaaaatcatatacaatagacactgtaaatgagacagaaatggagcagcttatgaaattcatacatgtttcggatgtacatcttggaataaaaccggatgagggaaaaccctggagtgaaaaaagagcgcaggatatctgggattcttttgcagaagtgatcggggcggcagtggagttaaaaccggattttttgctgatatcgggggatttgtttcatgcgcagccgttaaaaaaagaacttcgggaagtcaattatcttttcagcagaataccccagacgaaaattatcctgatggcgggcaatcacgattatcttcgtacaaaatcgtattatctgacgatggagtgggaggagaatgtttattttttccgtcaggaggaacccggtcattttgattttgatgaggaaaatgtcagcatttatggattaagttactggcatagagagatcggggatgctatttatgattcggtcatcccggaggatagatcaaggatcaatctccttttagtacatggcggagacaaacagcatatcccatacaatcccaaacttatcttggaaaatgggtttgattatattgctgccgggcatatccataagggagaacagcagattccggggagggcagtgatggcgggaagtctggagccgacggataaaaatgatgtcgggccgcatggatactggctggggacgatcgacaaagagcatacggatattcattttcatccggtgaaaaagtgtgaatactgtcatgaaatttatccggttacggcaaaaacaacggatcttgaacttggggattgggtgagaaacctgctggaggaaagacccggatatcagtattttcgtttatttctgcggggaaaaattttgccggatatagaatttgatacagaaaaacttgaaacgtttgaccgggttgttgatgtgacagagcagcttttgccggattatgattatgataaattaaaagaaaactataaaggtacccttttggggaattacataaaagaaatggaaaaaagaccacaggatgtggtcacaaaaaaagcgttggaatatggagtcaatgcattattgggatataagatatgcagataaaagaagcgatcattggtcagtttggaaaattgcagaacaggcagatctcatttgaaccagggatcaatgtgatctatggagaaaatgaggcgggaaaaacgacactgcatgattttttgcttgcaatgttttttggaatggaaaaggggcgtggaagaaat

SEQ ID NO: 5276 - DNA, 296 bp, Unknown
  gut microbiota DNA sequence
gaaagttttgatgcaaatgaaagagaaagtccttaatcatgaggaaatgttaaatcattatctgatacgcggatttatggaactggtcatattccgcatggaaaggcagtttccgaatgagatcatgatggcactggaaaaggtgaatctttcctgcccggttcgtgattctgccagaggacttttgagaaactgatgaagtaagatccatattttgcggaactctatatggctcaggataaaaaccttgcattttgagaacaggcgtgtataatctcatttttgacagttgatta

SEQ ID NO: 5277 - DNA, 3279 bp, Unknown
  gut microbiota DNA sequence
cgtaaatacgaccaggaatataagatccaggctgtcaaacttgccaaagaaatcggcggtgctaaggcagccaaagaattaggtatcccagaaggaaccatccacacatggctgaaagcagttagagcaggcacattggatattggcgacggtgcacatactccggaaagcgcgatgagtcttgctgaggagcttgccatgctccgcaaacgcgttaaagatcaggacaaagaaatccggcgtctgaaagaggaaaatgaatttctcgaggaagcaagcgcttttttcgcagccagccgtcggaagtcagcaagaaccaaagaatgatgttcattgccataaaaacgaaagacggcgtgattaagggaaaactctcattctattgccggatgcttggcgtcagccgccagggtttctacaaatatcttgctattaaagatcgcccttggaaatatcaggatcttgctgatgccatgagagtgatccatgctgaggatgaatgcaatgatacctatggacgtattcgcatgtaccaagcactgctccttaagaatccgacgggaatcaagatccccagtgaacgaaccgtttacagggttatggatgaaataggacttgtccatcggccaaagcgcaagccaaatggcattaccaaggctgatcgggaagcacgtaagtcagatgatcttctgaagagagagttcaaggctgataagccacttgaaaaatgcgtaactgatatcacagaaatcaaggcaaaagatggaaaactgtatgtttcagccatcttcgactgctttgattccagcgttctgggactggcaatggaaacaaacatgaaggcaactctgtgtgagcatacactggataatgcctatctggcgcatcctgatctgcgaggtgccattgtgcactccgacagaggaagacaatataccagtgaaacctaccgtcaggcgctttctaaatatggcattatacaaagcatgaacagtgatggtggcaggtgccacgataatgctcgatgtgaaagcatgtgggccagaatgaaaagcgagcttctctatgaccgctacaatacggaaagcctgaccacggatgagctgagagttcttatttggagatatttcatcagttactggaacaacaggaggatctgctctgccaacggtgggcttcctcctatgattaagcgtcagagatactaccaatctctgggcctggctgcataggaaatgatatctttgagataaatgtgtcaaccaatattgacaatatcataattttaaatgcctttatatgaacacttaaagtgcagaaaaacaagcaatttcataaatgttattattttgagcgcaaatgtaaagcaatgttgatagaaaaaattgtttattttatttaaaattgctcttaaaggaggacacaaaatggaaattggaaataaaatcaaccaattaaggaaactttcgggaatgacacaagaacaattagcagaaaaacttaacgtatccagacagactatttccaaatgggagtcagatagcacttcccctgatttagaaagtatcgttaaaataagcagaatttttcatgtgtcattagatgatttgctaaaggaaggagaagcaggtgtggcaaacaaaactgatgagcaaataactttagaagatttgatgaaaataaatcttcaaaacagaaaaatgacgctgttgctaattagtggtctgatttttattatggttagcatattaaatttcgcctatgtaattgcgctacaaagcacaacacttagtacccagtatatgctataccgatatatcgttacaggacaatacgaaaatgcccctattgattatatgcggttaatgataccgtctattattgcggcagcaatcggagtgatattgttcataagttataccattgaaagaagaaaaaaaggagactgaaaatatgtataaagcaaagaagtttatttcatatatggctttatgtgtgttaatcttttctttatgtgcatgtggagaaaaaggtagtgaaaacgctgctatttatggagaaaccgtcggaggattggaagataatgagctttttgcaattattgatacaaatgcttctttacctgttttacttgttacctcacaagtatataatgacggtttgggaaatcaggcagcacttaattgtgatgtatattatttgatagataaagaagttaaaaacataggaacaatagaaagtatgggaacagcatatcctatcgcctatgatgaaacaggtatttatgctgcttccggtcacgatatgcagcgttttgaaattgaaaaatccggttcgctcagactggcagaggggatttatgagcaatttgacgaaagtggaaatgctgcttataccatgaaaaaaggagaggaaacagatgtaattacagaagaagaatactatgcagcttttgaaaaatacagcaatgctaccatagtaaatttctcttatggtgcatcggacgctggcaaggcagaagtggtaactaacaatgagctggaaccccgtcaaggaaatatagcagaagatgtcaatgtactagaaattgtacaagagacagcctcggaatttgcagtcaaaaaaatggaaacttcttatttttgaaaggcaggacaatgaaattttttatgccgctactttggtagaaaatgattgtgcgccggagatgatatttttacaaacgacttacagacaacacttaaagaatagcaaacccagtcgagccagtcaacggcaagatgaacggctcttgcagagccgccgttgacagccccgcccggttttgcagttaggcagtcaaggagcgacagcctaaagtgctgccgccccttacttttatgatacagcatcaactttggaagtatatcctgatgctgtatcagaggaacacagtacacaagtgagttatatcgtaaagcaatcagcaaatatggcattctccaaagcatgaacagtgctggcggcagatgccacgacaatgccagatgcgaaagcatgtgggcaagattcaaagaagaattactttatggacgttatgataccacttcaatgacagtagaacagttaaaaacactcatctggagatatttcatcagctattggaataaccgaagaatctgctctgctaatggtggcttacctccgatgattaagcgtcaacaatactacgattcattacaggaggcagcataggtcgaacatccttgagaaaaagtgtaaaccaatattgacaatatc

SEQ ID NO: 5278 - DNA, 1251 bp, Unknown
  gut microbiota DNA sequence
ccctagtaggattcttgctggtggcataacataattcgtgcattaatatggatgaatagacaaaataataggtgtcacctactttacggatggaagatgcctcaaaaaactcatgtccctcaaatccggtaccggcaccatattcacagccgggggccacaaacaccggagcttccctgatcgtcagcatatctgctcccaacaccgtagccatagctccggtacgggatttatcaccttttccgcaagctccggtataaagatatgtcacatctccttccgtcagaacccccgggtcaaactggggttcatcaccttccttttcgcccagacgtgtgccatcttcataatgaacatagccataaaattcatactttcctgccggagtgtcacatacagcaactgaaactaccgaaaccttgtccaacacgtaataaagatagtaccttccgtccggtcccaccgtaacatccggggcatacagacacattttgccttccgggttcagcggatcggctgtcttcggataaatcacaccctcatatctccagttgcccaggtcatcgaccggagctgaccagcacacatagtctcccatgcagaaaacatatccgttaaagtaatcatgggatccgtaaacatatacgcgatcgccaaaaacataaggttctccgtccggaatatactcccaggacggtaaatatgggttaaacgcctgttttttcactttgatatcctcctttacaagcctaatctatgtacattgtttcataaagcaaattactgggtgctagtttaagccttcaagctgaccacacgatcatagtcatatcctcgatccggattcacctttccggcattcagttcgaaataaaccacaccgttttcgtttacaggaagctctacgcagatatttccgtcctcctgctttttacgctctgtttttacaaaaggtctggatgattcccgaatcagcttcgtctgttcctcactcagattggcaggttctcccatatcatgccataccttcaagggattacatgtttcctcatctaccgtcttagtcaggaagcagtactcctcctgttcagccggaaatgtaaactccaacagcattttttctttaccctgttctgtacttttacgggcaatattccaggctacacctagataatcaccgtttgcacgtttcaaaacgacaatattgtcatccttatatacacaattggcttcactttcctcaagcttttt

SEQ ID NO: 5279 - DNA, 1519 bp, Unknown
  gut microbiota DNA sequence
ccctagtaggattcttgctggtggcataacataattcgtgcattaatatggatgaatagacaaaataataggtgtcacctactttacggatggaaggtgcctcaaaaaactcatgtccctcaaatccggtaccggcaccatattcacagccgggggccacaaacaccggagtttccctgatcgtcagcatatctgctcccaacaccgtaaccatagctccggtacgggatttatcaccttttccgcaaaatccggtataaagatatgtcacatctccttccgtcagaacccccgggtcaaactggggctcatcaccttccttttcgcccagacgtgtgccatcttcataatgaacatagccataaaattcatactttcctgccggagtatcacatacagcaacggaaactaccgaaaccttgtccaacacgtaataaagatagtaccttccgtccggtcccaccgtaacatccggggcatacagacacattttgccttccgggttcagcggatcggctgtcttcggataaatcacaccctcatatctccagttgcccaggtcatcgaccggagctgaccagcacacatagtctcccatgcagaaaacatatccgttaaagtaatcatgggatccgtaaacatatacgcgatcgccaaaaacataaggttctccgtccggaatatactcccaggacggtaaatatgggttaaacgcttgttttttcactttgatatcctcctttgcaagcctaatccatgtacattgtttcataaagcaaattactgggtgctagtttaagccttcaagctgaccacacgatcatagtcatatcctcgatcctgattcacctttccggcattcagttcgaaataaaccacaccgttttcgtttacaggaagctctacgcagatatttccgtcctcctgctttttacgctctgtttttacaaaaggtctggatgattcccgaatcagcttcgtctgttcctcactcagattggcaggttctcccatatcatgccataccttcaagggattacatgtttcctcatctaccgtcttagtcaggaagcagtactcctcctgttcagccggaaatgtaaactccaacagcattttttctttaccctgttctgtacttttacgggcaatattccaggctacacctagataatcaccgtttgcacgtttcaaaacgacaatattgtcatccttatatacacaattggcttcactttcctcaagctttttataaaaagcaaatgtccagaaggtcggcttggtaatacagccattggcaaccagtccaaagccgccgtggaatggtgtaaaaggaactccctgctcttcaaacacatcaccaaatgtccagtaggaataggattcattcacatctcccaatctggaaagctgctgtgctattaaggccgcattcaggtttgtatcatgaatgacgccctgaggagtataggagctgttgaactccgtgatatgaatctgcagacccttatattccggg

SEQ ID NO: 5280 - DNA, 7573 bp, Unknown
  gut microbiota DNA sequence
gtaaaaagcaaatgtccagaaggtcggcttggtaatacagccattggcaaccagtccaaagccgccgtggaatggtgtaaaaggaactcccagctcttcaaacacatcaccaaatgtccagtaggaataggattcattcacatctcccaatctggaaagctgctgtgctataaaggccgcattcaggtttgtatcatgaatgacgccctgaggagtataggagctgttgaactccgtgatatgaatctgcagacccttatattccgggaaactgtcaataatatctctggttgtttttaaattggcaaagccgtcctctgccttcatcagttcagaatatgcataatgtccaatacattccggcggatcaatggtgtaatgatgtctggttacgaaatccacaggtatgtgattctcatggcaatattccataaatgcctgaatccatttctcatccgttcctccacaaacagcagggcctcctacacggaatcccggattcacttcctttatggcatcaaaggttctatggaacagcttaaaatattcctgcatatccgcattttcccagaagccgcaaagattgggctcgttccatacttcaatgggccattgaataacttcctcttctccatagcgtcccatcagatgccgcagcaatgaatgcaccatattacaccacatatcataatcttttggaggagtggtatttccctgccagtaaaagatagtctggcttccacttgccaactttttaggcataaaacccagttcaagaaaaggtctcagccccaccttcttataggcatccattactctatccagataagtatagttgtactcgacccttaccttaccatcctcctcataggtctgaaagatcgccatatcatcacagaataatccatgtccccggatatgcttaaatccgatttccttttgaaccaagcgcagctcctcctgatattcttctgtcaatgcaagccccattcttccggttcccacacaataatctacattattgtgaaaaaaggcctttgaatcctttgtaatcacgatcttttttctgtcattctctgttgctccacccaaatttaccatgcatgtatctccttcttccaaatcatgttcctatgcagtaacgcatcagatgtctgaccgctgcacgatccgcagctctctgatgacgattgccatattaatctgatactatcgcattgatctaaagtttccaatgatttatactataagaaaattgatatatcctctgatgtatcagaacggagattccagatgactgaaattgaatttgtcggctacagtgccgttcacccctcagattttatatatgatgttccgaatggctttacaggctatcttctgcttcttttcgactctccctcggagctgctcatagacggaagactaatgcggacagccgccaattctgctattctgtatacaccaggaagcaggatttattaccgtgctgccggtgaagaataccggaatgactggattcgttttcgttccgatcactccttcgtgaagctgtttccgttaacaaacaccccatttcccgtaacagatccggaatactgtcatcagctttttaaattactaacctgggagtccgcctttttctcctctgaaagcgaagcaaacattactcacctgctgcgggttctgttctccaaattaagagaaggaacccagaatgagtccccgggtattcacgatcatgagctggttgcattgcataagatgatctacaataatcctcagcttccatggaatataaacatgatggctgcgaagcttcacttaagtcccagtcatcttcagactctctatcaccgccaatttggctcctcctgcatggacaatgtcatcgaaggacgtctgcgccgtgcacaggatttattagagttcagcgaatactccatccgcgacatttccgagcaatgtggttataataatgtagagcatttctgcagacagttccgtcagcataacggctgtacccctggacaataccggaaaaatgcatcagcgggaagcaacaaaagacttctcacccacaataccctgggaggaagggagtttgagaagattaatcgaaatatccggaaatagtgtttcggtagctgctttattcagcatttccttaagcgttcgcttctacctgtaaataaatttcagctttccgataccgatttcatctcctgtgtgccccgattccagcttacattttgtaccggagcttcccggctctgacttccctgattccggtacgaattctgcgtctgcatattgggtttccagttgctttgcgccattgttacattctgttcatggatcctctcttccatctgttctatcagactttttatttacagttgtactttcgtttcatttctcgtcttgccttaatctttcctaagttcttttaagaaacgtccaatctttttctgatccatactgtttccccctttcattgacagagtaatattattctactaaacataacacgacacaaagcgagaaaatgccgtatttacgctattggacaaatctgtctagtattatttatattggctttagccccaagaacttcaagttatctttttcttcctaaatatcggcatacttttaatttgtattgcaggtactcatttccgaatgcttctatcaaaaaatcttcctctacattgactatctgcaaatgaaaaaataccactgcaaaacctgtagcaaagcaaaggaaccaattaaagaacgaaaacaatattcctatatacattaaatcaaaacccaaaaatgcaggatttctgctaatagaatagatgcccgttgttaccaaactggtcttttcttctttttgcacacctgctctccaattctccttcatttgtgtaacagaaacaataaaagcaagtacaccgaacattgttattacaactcctgtaaattgcaacacaatatgtactgttcccgaataaaacacaatactgataatctgtattacaggaagcaaatatgtgattattttaagagccacttctataaatttgacaaatccctcttttccttttcctaattgatctgtctttatgccttgctttttctgactaatcagctttgcaaaatagcagatgtagaatactgccatcagtgaaattgtaacaatttttattatcatcgtgtacctccaaattgcgattttctcaattctccaaacttgaattaatcgatttctttattatctaatctgttagtaatctatccaacagcatctgcctattatttataaacatttctgttacctggtaactctctgtatcctcatattcgcacagatgtatgcgtccattatcaaaacaatagatatctgcatctggtattcctaacaaaattggcgaatgcgtaactataataaactgtgctccctcttttgcacatctgtatatttgcatcaacaatgtaagctgtctctgcggcgataatgcagcttctggctcgtcaaaaagatacaagccatttggattcatattattctgtgctaatgcgagaaaactctctccatgtgatttttcatgatatttagcggaaggatgtgtaatatctgcatattcttcttcctgcgttgcaacattataaaagctttctgccctaagaaaatatccccacttttccttccgatagcctttggcaattcttatcgcatcacacaactctgaatgtgtatcatgcgtagaaaaaacataattcttcgttccaccctcaggattaaaaccatgtgctacggcaagtgcttccaataaagttgatttaccgctgccattttcccctacaaaaaaagtaattggtttgttaaaatcaagtttttcaactcccttaaaagccctgattcccttcagataactatccttatcaattttatcccaatcaaatattactccttgtataaattgatcattcacctaatcactttttccttttaaatatcccataaactgtgatatactatatttcggtgggatacttactaacatatggatatgatctggcattaagtgtccttctattatttccacacctttatatttacacaatattttgatgatatctctgatatcttctttgtactggttgtatatcacttttcttctgtactttggtgtgaatacaatgtgatacttgcacatccatttagtatgtgccatagaatttgtttgatatgccattaaaatcacctttcctttcgttaaatagcagcctgaacaactctattttagcggaaaggtgattttttgtataacaactttgttgcaaaatttgactgttcccggggggaatcgaacctgccgggaaaataatcagtcctgccataatggcaacgaatgtatccagtgcgcagatccgaagtccctcgccagctaacgtatgatattttcccatgtagctgccgaagatctccatggcagccactccaaggcttaaggtaaagaatgcctggttcatggcggctgatacgacatttccaaatccaacctcctttacagtcttaagattcggaatcaggtagaaacggattccctctcctgcaccggacagggtaaagctgtggacggcgagcaccacaatcatgattagcagcgcactcatcaggattttactgatcttctcgagaccgttctgcagtcccttgctgccacatgccggttccccgttcactctgttataggcacccatgaccgcttccacttttgcatctttgacgcaccgcttgaatgcatataaataagtatcatacagatcatgctttgacacctgcgcattgaactgatgcctgagtgcttccggtccactatgtactgcaaaatgcttcgcgcaggctgctgcctttggatgctccggatccggaccctgcaaacctttgatgtatgcacagcctaattctcctgtcagatacggatcctccccgtatgtctcatgtcctcttccccatcgtggatccctgaaaatattaacattcggtgcccagaaggtgagccctttatagatgccgtggtcccctcttctcgaaaattcattgaacttcgcccttccttctgtggaaacgacatctccgatctcctgtatcagttctctgtcaaaagtggctgccagcccgatcgcctgtgggaacatggttgctactccggctcttgcaactccatgcaaagccccattccaccagttatatgccggaatgccaagcctttcgattgccggtgactgatagagcatctggctcatcttctcctccactgttatctggcttaccagttcttttgcacgttttttatctcttcactcattttatcgtctccctctcccatatctctttcctaattatatccgctgtcatttttttccacaaccggctaaaataacaaaatttcaaattcttccagtcccaaatgaatgactgtgctcccacttttatccgtaatttttcctactcaagtgtgaatgacagtaagtcaagatttccgtatcctctatatgtaaaatagattgcctgcttaccatccgggatctgtgcctgaatctcatatttctcccacacattgctgtttacaatctgaaccgtcccaagcacctcaccatcccaggctgtcttaacctcgaacgtcccacttccatatcctctcactttcaggatgactttctgtacattttcacattcaaagtatttaaagcctagcgttgtggtatctgtaatatgggaaatgtaccccggttccttatcaccgtctcttccatcctgcatcactcttggaaatctctggtttgcatcaaaaatgctctcctccgctgtaaacagattgcatgcaatataagccgggtattccccccttcccactagtgatccgccatttaatccacaggatgtcagttccacctggcggaagcttccatcttctgccaaatgaagcttttctgcacacccctgtctgctataccaggttccgttcgtctgtctgtgataaaaaatataccattcactggaaatctccacgatacttccatggttgtttccgccataggcagatggcatatctgcaggtttataagtatctatatgcatatcgcagttgcttaccagcacacccctatatgtgaattttcccgttggtttctcactggttgcatagcataactcatgcatcaccgaagacgaataaatcagatagtatgtgtttcctatcttccggatagatggtgcttcaaaaaatgcatgtccctcatatccggttccatccgcatactctcctcccggtgccacaaataccggttcttcctcgatggtaatcatatccggaccgagcactgtcgccatcgcaccatgtctcgttttgtctcctcttccgcaaaatcccgtatacagataggttcgcgctccttctgtcagtactcccggatcaaactgtggttcatcccccggtctttccccgagtctgtctccctttttatcatggacatatccataaaattcatattttcctgccggtgtgtcagaaactgcaactgatacgacagagacatggtccagcacataatacagataatatcttccatccggtcccactgtcacatccggggcatacaggcacatctttccatccctgttcaatggatcttctgttttaggataaatcactccttcatatctccagtcggcgagattgtcaaccggtgctgaccagcagacataatctcccaggcaaaatacatgtccgttataaaaatcatgggatccgtatacatacaccctgtctccgaacacatacggctctccatccggaatatactcccacgatggaagatatgggttaaatgcctgctttttcttcaatcttaacacactcacagagtaagcaggtgcttcataaatgaattttttagatgctccctccatcttcaccgtcttgtcactcactttttccggttcttcaaatgtattctctgctgtcttttcccctgtcagaagaactgcctcatactcacgctctacaccgcagtctaaagagatttctataggatctgtttttccttccatgttaacaagtttgataaaaatttcatcctctgtcactgttgttacagaagatactgctggaaaagatggaatttccacttcacgtactatcttccggtctataaagagccgtaccgtctttccatctgtctcatatccaaaatgatgatatcttccaggctctatacaaagcggaaaatcttccgtcagtctcttctcctcaggaattgctgtttcccagaacgatgcatgatcctcctctattttccagagcagaggtcttactccaaacggtgtccatattttttccgcaccttctaacaactggtcataataagataaaattacccttgcactgaaaatgccaatttcaaagctgctgcctggttctacataaatatcaacatcaaattttccacaggtatctgattcctccccgaatacaacaaagctcttctctttgtctccccatggcattttccggca

SEQ ID NO: 5281 - DNA, 2364 bp, Unknown
  gut microbiota DNA sequence
acagcttagatccattcttaaattcatccactccggaatttttctcatatgtacagtcgatactgtaactgatataactgcctctgcttgggtttttaaatttactatccgcatattttgtccccctgtcgccctgtttatcaacgtaaaacgttattgtatgttttttagcatcccaatcacctgtgattgtggttgttttatcagcctccttattataaaccgtgagttttggttttgtattcgtcggagttaatgcttcgtctaatgtaacaaccagttttccattgtaatatcccgtcttagactgcagcgtcttattggtaatcttctgtgaaacagtaactgttgtcgggctttttactgtcgtaacctgagctccttctgcaaagttatccgaaatatctaccgcaatacccgtcacaaacatggtaacccagtgcgtttcatcccctgtattggtctgcagcgtgtatttatcatttgcataggcaggctgtgtactctctttgggaattgtaaaatcaaccaaatctccccttgtcgtcgttacttcatcgtacagtgcctctccattaatcgataaatatggactcacttcctttgacagtccgaaaatccgtttgtttttattaaacttttcagtttctttctgtgcatacagattcagttttgtcagattaactgccgtgttcccactatacacaaaaatcgtcagatattgtccagttaacggctctttatcattcgccttatatgcctttgacttcacttttgtgaccattccggtcttgatatctttctctacccattctccatcgtgttttgaaacatcatcaatattaaaatccgcagacattctaagacgtactgctctcatcggaaccgttatatcacagttttccacaacgatcagctgccatcctccggcgccctcaccgccaccgatatgttcataatacggaatgttaaataccgaatacgttccgtagattttgtcacttttattaatgatgtctgttacatctgcatacatattgacaaaagtgtactgtttatttactccattttcctttttttgatctatataatcgatcgaccggttatcataagttgcatactgtgcctttatcagttttgccgatccatccggcagtacaaaggcgatttctgattttgccaaagcagctgcatctgtcgtcgatctgtctacacttgttcttgcctgccataccaaatatgcagcccgtactgttccatccccacctgacgattttgtcagctttgcagatctgttgtttttgatcttctttccaatcacggagttgtctgcttttttcaataccgtttctgcagctttatattggtctgctttactgtcataggtgttatagtttgtaacaatatcgttagaccatgtatcatagttcgtatttccggtatagttgatattcaaccgtccatacaacggttttcctgcccccgcctgtgaatccgtcatatagacttttcctgcttcttctaccgtgatcgctttcacactctgcggaatcatggtgaccagaaacattactgcacagagcagtaaaaatctgcttaattgtgttatcctgtttctcataaatctcctttcgactttttgtcatgtgtaatttatattttcatttcgaaaataccgtaataataaaaaatgaactgcaaggtaatcagatgccaagcagttcacttttctgtggcagcctataatagactgccatctactttattaaattttccttgctgtttaaagttttgttacccaaccatctttttcatcagcctgatccatgcctcttcctgttgtgaaacctgtactatatttagcaaaggaagtctgtttatcgctgacagtcactttccacgaatagctccagcgcccatcagcggtttttaaagtaatagtagttgatccttttcccattacatcgagataatcttcttctactactcttaaaacattttcattgctgctggtcataataattttattattacttgcaatattgtatgagtaatcgcatgactctgccacttttttatctgctgagaaaaattcctccgcaacaggcatccgtctatattcgatcgtgccatcatcatttttcttcacatagtacttgatattatcatacatatcaaatccaactgccagcaccatgtcgtttttcttaaccgttaccttgtatttcgcctggactttcttattggctttggatgtaactgtgatcgttgcggttcctacctttttcggtgtaacaaaaccggtagaagatacagcagcaacacttgtgttgctggacttataggaaacagcactgttcttta

SEQ ID NO: 5282 - DNA, 700 bp, Unknown
  gut microbiota DNA sequence
aaccttcaaaagaatgaaagattacattttagaaaatcgagatcttattggtcagagggaaatacttcagttaagcatggagacagctaacaacagaatagaaattaacaaaatcaactcagatatgatatcactggaaaagcagatttcagatgttgcagaaggactgaaggatgttgtaacaaaatctgagttggctgatatgatgaacagctttgtttcagatgatgatgatgaaaagtggctcatgtttaatgcaaaatttagtagtgcagatgaggtatatgagtccatctataggcaggcaaagtcatcaatatatgttgttgataattatattggattaagaacgctggtacaccttaagaattctccgactggagtaaatattactttgttcagcgataatgttgggaataataaacttcataatatagaatttacggatttttgcaaagaatatccatccgtaaaaatatcaatgaaaaagacaggtggcatattccatgatcgttttatcgtattagattatggaactgctaatgaaaggattttcttatgtggtgcttcgtcaaaggatgcaggggctagaataaccagtattgttgaagactatggagtatctaaatatactccggtgattgcaacgctgttgaaaaatccaactttgattttaccacagtagaggggagtgaatgta

SEQ ID NO: 5283 - DNA, 300 bp, Unknown
  gut microbiota DNA sequence
aacctgaaatccccattcctcctgttctgcccatacgaagaacttcacatctccattctcaatactgtccgtctctttctgtagaatatgggaaccgtagaccgcctcaatctcctcatagcttttctgtgaaaaatcttcttgcctgcatacatactgaaaacggcaatgttcctccccgtccgcatttttcaagtacagcgaaagaatcaaatcctccatattcctcgaaatagttcccgccgtatcccagtctttaaaaccatccaccagtaccacttcttttccattatgggtata

SEQ ID NO: 5284 - DNA, 485 bp, Unknown
  gut microbiota DNA sequence
actgtacagtgtcggcaattcttctatttgttctgcaagtgcatcaaaatccttcacaccggacacggcaacatcaatgtcacttctctcccgtgctgttcctttcgctctggagccaaataagatcacctccaccgccgaaaaatgcctgcaaagttctgcaaccgcctgtattacttcttctgccctcacaaatactacctgcctttttctcatattgaaatcattttagcagacgttgccggcaatagcaacgattgcctttgacgtgtatttatggtttaatattaacaaatacattcacaaaaaaggaacccgacatgaacaaacagaaaatttacacctgcctgaaagatcacaacatctggcacgagatcacggaaacacagttcatgttgtttccatctaatcagataatatacaaagaggaagcacactctgctttaaatgtgatccattcactgcagtatgcttcctcttttttt

SEQ ID NO: 5285 - DNA, 760 bp, Unknown
  gut microbiota DNA sequence
agcagtaagggtacagagaatatggagaagaatcaatatattccggttatgatacagagcctgaagaaaaaaagcgaaattttagacaccataatggaattaaatatcaggcagagcgaagaattggaaaatccggcattagatccggatgattttgataagacagtagaggaaaagtcaaagcagatcgaacagctggatctgttggatgatggtttccaggaactatttgaccgggtaaaagatgacttgaagaatcatcaggatctttatcgtgatgaaatagcgcagatgcaggattatatccgtaaattaaccagtaaaagtgcaaccatacaggtacaggaaacacgcaataaagatttaatgacaaaaaaatttgcatctgtacataaacaggtcagagaagtccgcaagagtcagcgtgttgtaaatcagtattataaaaatatgatgaagacaaactatggcgagtcggtgtttacggacaagaagaaatagagatagaaaaaagaaaaaaatttcttttttactataaagtatcgggatgaacatccgatatataatacaagtaaacaaagtgatgatgaacattacttgaaaaagttacttggcagtggaacagaatggagcgtacggccgggaaggaaagctgcaaaattaagacgatgcggcatggaagccgcagtaaattcaaggaggaaaatgaattatggtagtacagcacaatcttacagctatgaacgctaacagacagtta

SEQ ID NO: 5286 - DNA, 990 bp, Unknown
  gut microbiota DNA sequence
ggataagcatcgcgcttatcggagagtccgactttctctaaaagggaaagtgcttctttttcacattccgcacggtctttttttaagaccgtgataggaccttccataatattttccagcacagttttgtgaggaaaaagctgaaaattctgaaataccataccggtcttcatacggatagtgcgaatctcgttactgctgtattttactttctgtccttcatgaaaggtcatagaggaaccgtttacattcacggtgccgctgtccgggatctcaagcagattgatacagcgtaacagtgttgtcttaccggaaccggatggtccgatcagaacggtggttttattttttgggatctctaaggagacaccttttaagatctggttattgtcaaatgatttataaatgttatccaaagaatacatatgctacctctactttccgacacgcagttttttctcgatccatttctgcagtccggtcaacagcgtacagaaaagaaggtaaataagcgcaacttcgatatagatccaaaggtattcgagtgaacttgcagcagcttcctgcgctttacggaacatttcaccgatcatgatcgtggatgcaagggaagtatccttgacaagaccaataaaagtgttaaaaagcggtggaatggaaactgtggcagcctgtggaatgatgatacggcggaatgtctgctgataactcattccgagagaatagcctgcctcccactgacctttattgatggaaaggattgccgcacggatcgtttctgcggagtaggcacctacatttaaggagagtgccgagatacaggcaacccacttgttgatgccaaggggattacaaataccccagtacatgataaataactgtaccagcagaggggttccgcggaatacccagatatagattccggcgatctgttttaataccggtattttgttgataataaaaagtgcacacagcacggcaatgatgaca

SEQ ID NO: 5287 - DNA, 676 bp, Unknown
  gut microbiota DNA sequence
gcactggaaaagtatcttccggaaacactgcagcttatggatcatggaatgataacgacagactgcccgactgcagtagaggttgaatccgtagatatctggtctgtgaaggatcttacggatacagagtacgaagtaacgtattgtgtaaagcagcggatatcggaaggtgaacagaccacggagcagagcaatgtgtatcagatagcagtgcatagagatgaaaatggaaaaatgttagttgtaaaaaacccgacagcgtatgcgctgccgggaaaatcctcttatgaagtaaaagcgaaagaaacagatgggagcatagatttaaaaacccagacacagatcgaagattttttgaatacgtttttcaagctgtatccccaggcatcggcgaaggaacttgtctattatgtaaaggatggtgtccttccggcgatcggaaagaattatgtatatgatggactggcaggaaaagcctactatatggaaggtgatcagacgaaggcagaagtttatgtaaaatacctcgaccaggatctgaagatcacacagatcatgcagtataagctgacgctggagaagggggataactggaagattgtgaatgtagagtgaaataaaatgaacagaacaaaggcttcatttcagtgtgatgctgggatgaggtcttttttag

SEQ ID NO: 5288 - DNA, 509 bp, Unknown
  gut microbiota DNA sequence
gtaatgatccttccgatcagtgtcgtcactacagcaatcgcaagacccgctgccacgatcacaataaatatgattacaatgcatacattagccatgacctttgcctgatctaattctacctggaacttgtcacataatatagttaatttttcagcaaaagctttatattcttcatacacctctccggtcatcagctttgctgcttcctgctgtttaccctcacggctcaacttcaggatttcatctgaagcagctctgtattcttcccatgcagcgtttgctacttcataatcatcccgtcctttttgagcatcactgtctgcagacatgattgcatccagattcgcaccggtatcctggatctgactctccagcttctggatttcttcttcgcaggagttcatgactgcgtcatctgattctaccagatgctgatactgtttgattctgtatttcgcagtcattgtctctaaatcctgcagatattccaatgacggagaccagacctc

SEQ ID NO: 5289 - DNA, 879 bp, Unknown
  gut microbiota DNA sequence
cgcatccgggtgcagcatgccattataggtcgtaaagtaatctttgatcggctggctcacgccaagggtcgtgatcaggtgtgtcagcacctctgttccatcgattccgcgccacatcatcgtatcgtaaggtactttattgaactggttccatgccagtttggttgtcataaaataatcgattccgcattttttcatgatctgcggcagtgccccggaataaccgaacacatccggcagccagaggatacggttgtccacgccaaattcctctttaaaaaagcgtttgccatgcataaactgacggacgagggattctcccgatgtcaggttgcaatctgcctcgacccacataccgccttccggctcccagcgtttctctttgatgcgctgttttgctttctcgtacaattccggatagcgctcctttaaaaatgcatataactgcggctggctggacatgaacttataattcgggtactcgtccatcagctttaacacagttgcaaagctgcgtccgactttttccctggtctgtgccacagtccaccaccacgcaacatcgatatgcgtatgtccgatacaggttgcgatcacatcctcataccctgccatatcctcataaagtgctttctggatataagcagatgcttcccgcacactccggtaaaagtcttcggaatacggggttcttagatccagcagattgatcgtctcattgagcacatactcaatatccttgcggttcttgtcatctgcctccatgcgggaaaacgctgcaagcggaacccacaggtcataatagagtttttcgatctctgcatcgatctcctcgatctgtgtgcggagcgcaaattcctcatgcatgatcccggtata

SEQ ID NO: 5290 - DNA, 1136 bp, Unknown
  gut microbiota DNA sequence
gttgtgcttgcacataaacatatgggacttggttatctgatacggcgactgccgtgagcgaaatgaagcgaagcggaattgagctgcactacgagtggcgatagagtaaaaaagagggaggcggaacatgagcgaagcagcaagaattgatctggtagacagagcaccattgacggagaaacagcagaatgtgtatgaaagtattatgcaatatcagcgtgtgaatggttatgctcctactatcagggagatatgcaagatggtaggggtggcatcgacttcaagtgtttatgcacatctgaaaatattagaagaaaaaggctatatagcaaggaagatggatgattccagagcaatagcaattttgtaaggaaggtgattacattgagcaataaggtatatgttgatgtacttgcagagttttcaaaggacggactgctcattcccaaagagataacatgggaagatggcagaaagtatgagattacacgagtaaaagacaagcgcagagcagccagtacaagagctggtggcgttggagagcgttatacctgtgtggtagatggaaaggaaatattccttttctatgaagataacaatatgtggtttatggaaagaaccggagcctgatgtgaatgtgtgctgacagcacaattcatatcagttggctttagatcagcaaagccggggaatgtgcatacattcatcggaactcccggcaaaaggcttgcaaaggtgatttccctttcctttacgagtacagaattgtagattgatgattttgtatgaataaggagcgaactgaattgaacaaagagttaaaagttatagatttttattgtaagaagtgcaaaaagagtatgaaagtttcatacatggttacaggtaacagaaattatccggtactgccgagagtcatgatgaaatgtcaccattgtggcagagtaatgaccttgaagaatttcaaggaaggcgagctgctggatagagtagaacaggataagtattatatctgatacatacagtcagacatcagatgttgcggcagatatttggtcgcaacaggacaagacaattaaattagtggtcatcatgatatgggagacacctgcaataagcgtaagctgatgatacgc

SEQ ID NO: 5291 - DNA, 1771 bp, Unknown
  gut microbiota DNA sequence
ttacttcatcacctcgtcttttatgatttttccatctccgatcgtgatgattcggttcgcctgcagcgctatcttttcgtcatgtgtgacaagaagaatcgtctgcttatatttctgattggtgaacttcaaaatatccagaatctctctgcttgttttactatcaagatttcccgtcggctcatctgcaagaataaatgccggctcgtttataagtgcccttcctatggatactctttgctgctgacctcctgacatttgtcctggcagatgttttgcccttttctcaagccccagcatattcacaatctcagaaagccgttccttattctcttttcttccatctaatttccatggcagtgcaatattttcctccgcagtaagagtaggtatcagattataaaactgataaacaatccccagatttcttcttcggaaaattgcaagttcatcctcactcattgcttgtatctcatttccatcaatgataatagaaccgcttgttgccttgctgttgttatcatctaaagtaatacctccaaatatggtcttaatatcttttcaacatgaaacatggatgcatatttcataagtgtcctcaaatttttatctttgcgtctggcatattgctttaaggcatcctgaaagacctgcatttctatattgttcctgctgcgaagcagatcacaaactgtccgctccatatcataaaccggaactgaatgcccaaatggtgtctgcatagtcgtaatccctgtttcatgtaaatcctttttaattgtatacacttgaaaaccgttttcctgcaaacggctcggattatacccggttcttacagttatagtatatttcaaaggctctctgtctgttaaatcgtggaaaaacaatgcagtttcatgagaaaacacagcctgactacaacgtaaatgcaaaatatacatcgcatctgtccatgtatctggtgatacatacacaccatgagcagcttgttccaatcctcgttcttttacataagaataaaacacaggcttactaattccattatctataacttgaaaggtctgaattattcctccatattcattcagcaataaatctaattgttcaaactgagtcatacacattctcctttcatgctaatatgataatatttattagcacgaaagtaaatacatatagtaccaataaaatatcgatattcttgttttaatgatatcctctggcttcccgccatccttttacataccacctgattccaacatataccagttgcacaaataataagagaaatagcagattgatcggcaatgctgtctttacccaatccccgaaatagattaccattatctacgaaagttttttgaatatattcggttgtataatcaatctgttcctgtctgctccattctttcggtaaggaaaattcaaatgagcgtccaagctgtgcatctgcattttgatgtttataccagtgccggctatatgcttcgcattgactgctgggaagctgaaaagaatttaaagactacacctggatcagaatgtgctttgacatctcttgcaattgatgccaacaatctagtcggctcgctctcgacacagtgctgcttcatacaaagcatcatattcagttccagacctgagattttcaaagctctccttgattgctacatcttccatcgaggaaatccaaagccgctcaaacggctttctgcacccggctttgtggtacaccaatcgaaagatcagctcgccctcacgaccggcatct

SEQ ID NO: 5292 - DNA, 323 bp, Unknown
  gut microbiota DNA sequence
tttgttgctttttttgtcaacatttgactttttcatcattaattgctatagtgtgaaacgttccatacaaatgctaggggtgctgtttataccacatggtatctacaacgtgctgagagatgatttcatcgacccttattacttgacccggataataccggcgtaagaaagcgttttcatttactttattctggtaagaaacaatcccccgtgtttgtatacaatagaatgtacgctccgcgaacattctattatcatgaattaggattctggtgtcaaaaggtggctcacaacttagcgattgtcaaattgcacaaagttgg

SEQ ID NO: 5293 - DNA, 2899 bp, Unknown
  gut microbiota DNA sequence
aatagaatgtccgtaaaatactcattctattatttcatacggcggatgatctcatttgcacggcggtaaatgtctgccggatcaaatccgatgtcaaatttctggtcttcgtataaaatttttccatttaccatagtcagttttacattctgcttgctgccgctgtatacaagatttttcacgatattattttccggctgcatatttggctgatttaagtcgatcatgacaaggtctgcttttttgccgactgcaaggctgtcacagtcaaataactgcatggcatgtgcaccgcctgtggttgccatgtataaaatttcatctgcactgacacactctgcatccatctcacgcacctttgcaagtgcggatgttagaaacatctcacggaacatatccaagcagttgttgcttgccgggccatcggttccgatcgccatggagattcccttatccacaaaacgtctggtcggacagataccggaagcaagttttaagttggaagccgggtttgtcactgcggtcagttttttcttcttgtagatttcaaaatcagcatcctcaaaccatacacagtggtaaccgccgccgccatactcgtacataccaagtgcatctgtaagctgtgtcggtgtcatgccccagcgttctttacactctgccacttctaattttgtctcagagttatgcagccataccggagattttaatttctgtgccagtttagccacaccctccatcagttcttttgatgtcgtgtattctgcatgaaatcccacgataaagcttgtcaggtcgctcatctcattgacaatgtgataattttcctccatcaactctaccgtgccgccaaagttgtttaatccgctggtctgaacggtacggaatccggtatctaccgatgcctttgcatcgaccggcgggaagaagtacatatcaaagttggacgtaataccgcttgttaaatattccataattccaaggatgttaagccagtatacatcatcttcggtaagctgtccttcttttgggaatacctgtttgttcagccagtcctgcagtggaaggtcgtccgcataggaacgcaaaaatgtcattgccgtgtgggtgtgcgcatctttaaatcccggcattaaaaggttgccttttgcgtcaatctcgcgctcccataccaaaacttcaccgtttttgcagacagcatccacgcctgtcttaccgtccccgatgtagcagatttcttttccttttacccagagttcgccttcggtgatctggaatttgtggttttctgccggaactaatatttttgcgttgtagaaacgtatgttcattgtttttcctcttttctttttgtgtttttcgttcagtggatcaaaaagtgtgaccgccgtttttgatctactgagttgtagtaactttaattctgctgtgctccgatcgctttgatcgtttcagttacgagcgccttaaatttcggggcaacggcgtcagccgtctcctgaacttctgcgtgtgagagcggaattgatgagatgccgctcgcaaggttggagatacaggagattccaagcactttcattcccatgtgttttgcagcgatcgcctcacaggcagtactcatgccgacggcgtcagcacctaaagtgcggcacatggcgacttcatgcggtgtctcaaactgcggtccggagagttggatgtaagtgccctctttgatgcggatctcaagtgctgatgctgcacgttttacaatatcctgcagatctaagtcatagatctggctcatatccgggaaacgcacaccaagttcctcaatgttggctccacggagcggtgatggcacaaaacttgcaatctggtctttgatcagcatgaaatccccggcatgcatgccaagctggatgccacctgctgcattggtgagaaacagaacttctgcgcccatcattttcatcagcctcgtcggcaaaacaacatcgctcatctcatatccctcataataatgcacacgcccctgcatgcacacgaccgggacatcatccacatatccgaagataaatctgcccttatgtcccggaaccgtcgacactggaaatccttcaatgtcatggtaatctaacgtatccaccacgcggatatcatccgcatagtcgccaagaccagagcctaaaatcaatgccaccttaggagtaaaatcaatctttgctttatagctgtcatagcattttaataatttttcgtatgccggattcataatcatcctccattcttctccttgtcctatattctgtcaattccggcttctccggaacttctcccttcttgtctttcaaaaacagctgatgcttccttacttcattttttcataattgaaaattctttacaacactgtcattttcgattataacagaagaaatcataaaatccaatctccatcctaaacaaaagctgattttccccgatatattttgtaagaatacatcacaggctatacttttcatatgcacggaaacacagtgcaggaatggagaattttatgactcagttcaatctttccggtttaaaaaagattttaaacccatcttccggcaaaaggaatgtggtcgatcagattacagaccgtttatccaaatcttccatcggtctttcttccggtgatgatactttaaatgctgtcagtttttccggcatggatgcctttgacctgacgcagaacatctccgagcttttaagccccgcctgcggtatgaccgaagaagaaaagcaggcagaattagccagaatccaggcaaaattaaaaagtgggaaaaaactgaccgaagaagaaatgcgttttcttcaggcagtagatccccagctctatatgcaggcagccagaatccaggcgatgcgcgactct

SEQ ID NO: 5294 - DNA, 804 bp, Unknown
  gut microbiota DNA sequence
gatatgccaaaccgtggttattattttgaccagacaaggggacgtgtgttaaaactggaagaactcaaaaaaattgcagacaggatgtgccgctataaattaaaccagcttcagctttatgtggaacatacctatctgttccgtgacttttcggaaatgtggagggatcagactccgcttacggcagaggaaatcttagaacttgacagttattgccgggaacgtcatattgaactggttccgtcgctggcaagttttggacatctgtgcacactgctctccacaaaaacatatggggatctctgcgagatggaggattcctggaaggagccgttttccttctggaaccggatgcggtatcatacgatcaatgtctccgatgagcgttcccttcctctgatcaaaaagatgatcgcagaatatatgcagttgttttcttccaacaaatttaatatctgtgcggatgagacattctgccttggcaaatataaatcgaaaaaacttgccgaagagcgtggcgtccatcggctttatattgactatgtcaaagagcttgcacaatttctggtggaaaatggaaaaatcccgatgttctggggcgatatcatctggaattcgccggaactgatgaaggaactgccggagagcatgatctgcctgaactggggatacgcaccggaacagagggaagatgagacgagggcgatcgcacagacgggtgcagtgcagtatctgtgtccgggtgtatgcggctggaaccagtgggcaaacttaatagaaaattcttataaaaatattacaaga

SEQ ID NO: 5295 - DNA, 664 bp, Unknown
  gut microbiota DNA sequence
cagaagatcggaagaactctgcgtgataaaaaatacaccggactgcatggaacgtccggcacgtacaagtttattcgataaagctgctccctgtgctacctgcaggagactccatgcctcatctaaagcaacgattttataaattttcctgtctgaataaataaaatccaatgcaaaagttccgatcgcgatcataaccgcaatacttaaatattcgatactggtatattcctccacatttttttcagaatccggcagcatcagatcctgcacctgcaaaatgtttaaagccttatctgcactgatcttacgcgtcacttttccatctgaaaacagcaatcccgcaaaatcataatcggtaaacgctgctatgtggcttgcaagcagatgcgcttcttcatcctccatctcatttaattcatcgatcacatataaaagtccgctatccgatctttttgtaactgcctttaccgcatcacgtaaaagcgggaaacgttttccatctttaatactgacgccagtcaaaaatgtcaggatatccatcgccaggctgtctgcatctttcttattctgcatgatcacatacggatcaagcattcctttattgccctcatcactggtcaggttgataatgttaatttcatccgaaagttccggaagcatt

SEQ ID NO: 5296 - DNA, 492 bp, Unknown
  gut microbiota DNA sequence
tttctgtgtcatacccgatataacttccatccggatcacccaggatgcgcgctgcaccgaatccaagtcccgccaggaaatctgctttcacatactggatataatcattttcatatcttgatccagacggaataaattcttcgtggaatccgatcatatcgccaaacgggcgtaccagtttaatgttaaaatcattctcgtaataatccctgacctccgcgatacgacgttccagctcctcttcgctttctgcagcaatccggacaacgtagcttaatttgtacatggattcttttgttctgcctaagtccttttccagctcgtccacatccaccagtgcctctaccacggaattatccgtatcggcaccagcctcatacgcatgctcatctaagtcatttaattcctttttcttattcctaaccgttgtcaatgcacttctgttcggcatgatctcaacgttcatactgacgtctaccggaaaacggaaac

SEQ ID NO: 5297 - DNA, 361 bp, Unknown
  gut microbiota DNA sequence
aaatcgatacttgtagatggaggtaatcaaaatgaaagaatatcaacatttgattggaaagattattgtcgcagtggcaattatagttgctgcaatcattatagcgcaggctattggtggagcaggagaaagcattcgtagtggcttgctgcaattaggggatgctcttcgataacttctagttttaaaaaaatcagaaatttgacgaaggaggttgattgtatgaaaaagttgatagcattagttttagtagtggtttgtgtgcttggcttggttgggtgcaacaacaagacagtcaatattgatttgccttttgaggtaggtgatgttgaaaatatagaaatgtatcactttgttggag

SEQ ID NO: 5298 - DNA, 1072 bp, Unknown
  gut microbiota DNA sequence
atttggtatgacgatatagatgatgttttattagtggactctggagaccagctatgaaaagtcaaccataaattagtaaaaaatttctttttcatatcggtggtaaaaaagggtaactttaatagagctcccttagggtgctttttcaaaatctatcgatattggtatacagacctcttatttgaggttaaattcgacattgtcggtgagcatcttccagatgactctgacaagtttgccggaacaatgcccaagtgcattgtaatgagaccggccttcagccctcttggcatcataataagccttgaaggttgcgttgtttctgacaacgttccaagctgcatttacaagggcatatcgtaatacacgagagccacgtttggacatccttgttgtcttagcctgaaagttaccagactgataaacagaaggatccagaccagcaaaagcaagcagcttgtttggattggagaaacggtgaatatcacctatttcaccaagaatcattccaccattgatataaccgataccaggaatggtcatgatgacagaatcgttgaatttcatgatatccgtcatctcagcttcaatcttttctaattggctatccagtaactcgatttgttgaatggtttgagttatctgaatagatatagcgctgtcgttagcaccgacagacttctgtgcgagaactcttaattctttggcctgttctttggtaaagtgtccgtgtgagttcactttgagcagattagccagatgagtcatatgcatggaagcaatctcttttggagaaggtgcttcttttaataaagcatagacagcgtgttgatgcagaccggatttgaaaaagtattgaatctccggaaagacctgatcaacataggttgtcagttgaattttcaatcgggtacgttgctttatggttttctgacggaaacgtcccaatgccttaagatccatcatatcgagatcgaagaagctgacgaatctgaggttgtcctgcatcataagagttttagcaatcacgtaagtgtcgaccttatctgtcttagttttgcgaacgttattt

SEQ ID NO: 5299 - DNA, 332 bp, Unknown
  gut microbiota DNA sequence
aaagggacttataccacagaacaattacttcacactttaaaaggcataaaatttacggatatagaagaacagggcttcatgccggtatatgaacgtcaggaaatcactgatgatctccatgaaacctgcggattcagaacggactatcaattcataacaaaacggaaaatgaaaggaattcagaaaaaaagtaagcggagataaaacattactatatttcgtgtatgcagataaaagtgccacgccccttgtatttacagggattgtggcacttttttaactaatcaactgtcaaagatgagattattgcacattttttttcatttgtcaat

SEQ ID NO: 5300 - DNA, 24903 bp, Unknown
  gut microbiota DNA sequence
gaaggaaatacaaccgggcactcggtcgccatctcccagagttctctagtaaatactttatcctccaacggcagtacaaatgtcagtgcgatcacattcgtggtatgtgcatgataaatcacccggtgcgctccattggtaacgccttttttcacttcatggttcatcaggtggctcggtagctcactggtcggtctgcctccgtttaccaggccccaaaggatgcggtaattctctcctttttcatccagttcgatgatgcagatactatcctccggatcaatgatgacattgcggaaatatttcccgctgcctgttacgaggaaatattcgctcgcaagtccggggactttggtggcaatcggtttccattcattgtcataatgaaggaactcttttacctccgccacttcctcgtctttgatgcggtaagacaggttgccgccgtttctctcgtgccatccctgctcccatccatcgttacacatacggataaatccctgtacaaattttgtatccaatacactcacggcttttccctcctacactctttttgtcaataccgtctcttcgtatttctcaatttccccgaaccacgtaccgtcttttggcgctccgcattcttcacaatactcggcccacacatcaccaaagggcagtgtttttatctcttcctgctttaccatcagctctgtcatacgtccttcgtcctgcagttgtttcagtgtttcatttggtgtcagcagtgcatttaaaagtgctttctggaaattacggaatcctacaacccatgcggagattctgttgatgctcgcgtcaaaataatccaaggcaactttatctacagaagacattctccatacagtaggctacgaaaacagcagcttttttcacaacaaatttaaagaactgtatgggaaaactccaaaagaatatcgtagagaaaaagctgccgcctctttaggagatagcaacagcttttcaaatgacgtctaaaattatttaacaacattaagataacataccgtaaccaagaatacgtccactcccaatcggatactgatgctgccacactcccctgacgctattgccattcactgtcgtactcgtattcccttctacggtatacacaatatctccctcacacttcttcacaatcgccacatagtctgccatgccggcgtctctccagtcgaagaacataagaagagcataagagcaagtttcgcctgagtaactcaaaactcactttcgtggtttccgttcccccgcaaacttgatgaggatttcgctccccataccctcgaataacgcatatttccatatatgctgttttggctccttatcagtcgcagcgtaattttttaaattacggattgctcttcccacaaagatattccaataggcttattcctataaggttattttcaaaggaggaaacagcaagtggcacgtcccaaaaaacataaagagttgaaacgaaatcaccagatcatgctgcgcctgacagatacagaatatgagattatctcttccaatgcaaaaaatgcttctcttccgttggccgagtacgcaaggaaactcatcaccgggaagactccaaagatcacttatgagattgtggcagatcttcctgagctgaaaaagctgatcggagagtttggaaaaatcggcagcaatttgaaccagatcgcacgctactttaacagcggcggtatccattctcaggaaatgcgaaagtatattcaacagggaattgcagatatttttgaaatgaaacatgaagttttaaaaatggcgggagatctccactccctctctgcggaactttcttccatacagaaaggagctgccgctcatggccatcctgaaacatatcaccagtaaaaatgcggattatggagaggctcagcgctatctcatgttccaatatgatgaagccgccatgaaacctgtccttgatgagagcggcaggatgatcccacgtgaggaatattatctggacggcatacctttgctttttccaacaatagaagaagccacactccttgctttagacgcaatggtttgtgtggctttggctgttcccgccgctgttttctttccttttttcgctgcctggtatgccttttgatattggcgtttctgccagaatttctgcaggattcccctttttgccttctctgcgttttttgccgcctgtcccgctgtttttccactggcttcctgtgctgtctcatgcaaaagacggcctgttcctttctcaaggaactcggattcctgcagacgggcatttctcttatgcattccacggcttgtccggtgcatcgtataccggagggcgcttctcgtaacgggccagcctgcggtactttctctttctccgcttatctactgcgatgtcttctctttttcccaagacgctcccctcctttcttctggtcgaccgccggcgcatccatctcataaaaattttctacctcatatctgcggacggacggctttatcaactttactgtcacgatattccataaaattttctcaaggggaagcccgtctttctcatacatagcaaatagaaatgccgggagcataagaagcaccatacctgtagccgcattggttgtcccaatccattctcttgtaagaaaataaaaaggcagcccaatggccgccgctgctgacagacagataagctgtctctttgtcagattcaacactactttattttttactttcgtcaggtcttttggtacactgacaaacgccataaaatcacatgccggagcaacttatccgctgcaggctgcacagttctccgactttctcctttcctctgttttcctgcaattttcccatatccagggaactttccacttcatttccccatacatcccagccgggagattgctgtcttgcgaacagttcaatccggggcagatctcccatcagtttcacaatacgctccctggcttctgccggctttttactgtgttcctctacatgggaaattatcacctgatgaacaccggcagactgccgctttggagagcctttcgttgcgagaaggcaaatctccgcatttgcacgagtccagtatcccataccccaaaacaaactttccgatttccggttctgtttaatccatacaaaagcaacggttttaaaagtaaatccccagcttcggattacctcaaatgactcccgtaaattcgggaatgttacccacagaaataaagtacagtctctatctgcaagctgttccaccggtaaatcttttattgcctctaaattcattgtgggatagtgaatcgccgctgacctgccgtttcctttcggggaatacacacggaatgtccagggaggatcggcataaataatgttatactttttctgtttcatcctgttccctcctgtaatccatatccagggaactatctacttcatttccccatgcatcccagcctggagatctctgccttgcgaacagttcaatccggggcagatctcccagcaattccacaatgcgtttcctggcttctgccggttttttgctatgctcctctagcgggctgataataagctgaaacactttttttgatattctttttggctttcctcttgttgccaaaagacatatttctgcattagagcgagtccaatatcccaagccaaaaaaatagccctgcccggatcggttcagcttaatccagacaaaagcgaccgttttatagcgaaatccccatgcctttatgacccggaacgcctccggtaactgtggaaatgtcacccacaaaaataatgcacagtttttctcgcagatttcctctgttcccattgtggaataatggttctctgctactccctgtccttttttcatctcataccgccatggaggatcggcataaataatgctgtattttttctgctccatcctgccgcctcctaatgtgcattaaaaattgaacggcttaaatttgccgttttcatcaaactaaagcacaggattactgtatatgcagctactgccgaatcggttcctctttcgacttggccggaaaaggatgtgcctccgattctgttgatttcatctgttgtttttcaatcagtaatgagtagtcccccatggcatcataaggacaactcctccgataaagcaggttttcttccctggtcaccctttctccctcctctccagtttctgtgctttgcatatccaatgtatcatcctgccagttatttttcccttgcagatatggggaaacatacaggattccctcccatatctgtggattttatcgtattccttcaatcccatccatcaaggcgctcatagtctggatcacaattttctgctcctttggacgcaggttctttacacgggaaaacatcctatgggcaggatttcccatttcttccggattcctgcctaataactcgttggcgtcagcatccagtatttccaccagctttgcaaaaatctcaatagacatggctgcctgccctccttcaatgcggctcactgtgttgacactgatcccggctttctctgcaaaagtctcctgagttaaatggctgtcttttctcttttgtctgatacgttcccccaactggatcaactcctgcgatcccgcacggtttcccaacacagtccctccttccacgataaattttactttgtgacaccgtgtcgcaaagtttcctgtccacagacagaaaaaagcagccaggtacatgaacttagctgctttcgtaactctatcattcactttttcttctgtaaacacttcacagtgttttggcacttaccaatcttgaaatcccggtaaccgccattttcgccagatagcagaccgccatcagaagacgccagaccaggacgaacccgccgattacgccgccgatcagcaggttgaatacaaacattcccaccgtaccgccaatatcaaagcccctcggaatgatccacaggaacatcctctgtaccccaaagggaatccctacaaacatccacagtttcaggtaatcacactgcccttgctccacacagagaggataaaacagcgctcccaggaatactgcggttcctaccggtacgatcacctttttcataaattcacttatccgcatttcatttacctccatacagatcatggttcacttccgcctgatagtaatggttcatcgtcatagacgaattgtaaagcgtagtcaaaagatatgccctgatgttcgccactttggatgtattccggtgcaggctgaacaaaacatactcgatatgggaataggtcagcttcaggaaacggcttttgactaccgataccggcttatctgccccgccgatccgcaccacgctgtcatccggcatcatcaggatctccaccatcagctcaataagctcgtccacatcttctttctcccttctgtccagaaagcactcataatcaatgttctcctgtatcagggcacgataggtttccatcctctctatcacatcttctcccacagggcgcacttcacctgcagatggagatagataggattggatagaatcaatctcattaaaatcagtctcattaaaatcagtattattaatatcagtattattagattgtgaatttggaacttcttgagttgtgatttccacaattcttgaagtatgattttcatcattcttgaattgtgattctggtaattcctgatttgtggttttcactattcttgaattgtgattttcactattctgcgtatttccaaggttttccggcgcttttcctctctgctcaggagaacacttttccttcagtataaagtttttcacatagattacattcggttttcccaatcccaaacgtttcttttcaatcaatccaatcccctgattatcgtccagttctttcatcagcttcaccgctttctgtgttccacaattcagaagctctgctatttcttccacggtaaaaatgatatatactctatcttcctcgtcaaaccagcggttcttaatgctaaggctcatacggtctaacatcagaccgtataaaacctttgcttcacaggaaagggatttaaaacactctgcggtaaacagcactttcgggacacggtaaaaactatactgttccgcttccatcccacggaaataatcaaactgtatctcctgcatttaattccccctcctttccctgtttccattgatccagaagtgaatagatcacttcctcaatctgttcctttgtgtatgccggcgggaagtaatcacggatcttctttgaagagatcgtcacagtctgcccgccgccctctttctttaccagaagcgcatagatacttccttctgacagcattccttcctcactcataactttgagctgcccggcctgagccggtgatggataaacaccaatgttctccgctgcctccatcaccatttcctgttcttccagcttcagataggataagcgttctccagctatcatcgcaatctttcctgtatccaccaaatccagaagcccgttaatcaggctggcaagccggatatacctctgtaccgtccttccgctgtccccggctttctctcccacaacatccgcagtgtgcttgtcccctttgcttccctgatgtttcagcgcctcatatttcatcttgtaagccctggctttctcacttggcagaaggttctccctttggatattggtatccaccatcagcaccgtagctgcgtcatcatccagatcccggataattaccggcatgtccggctttcctgccagttcgcaggccctccatctgcgatgtccggctaccacctcatatccatctgcacaagggcgcacaatccctggctggattacgccgtgctggatcacactttccacggtttcctgcattttttcatcgtccaataccttgaaagggtgatttttaaacggatgaagctggcttaaggcgaccgttgtatagatgccttccacgctattatcttttgttccaaacagatcgtcataggaagtcagcttgattttctcagcactcttatttttcatctgcaagcacctccccggtcaggtggcggtatccctctgccacaatccctttcggatcatggagataaatactctttccctccgctgttgtctctgccgctcgtacagacatagggatacaattctcaaagatatggatgttattgccgtatacatcacggatctgttcagaaatatcccgtgcaaagtttgtccggcggtcaacctttgtcagcagaatccccataatggataacctggggttcagccgcctgtgtaccttgccaatggtcttgataagctgctgcaggccctttaccggcaggtaagccgcttccaccgggatcagcacactgtctgccgctacaagggcattaattgtaatcatcccaagtgatggcatacaatcaatcagtatgtaatcgtaatccgcttttaccccttccagatacagacgaagtacctgttctcggctcattacatttacaagagatgtttccagtccggcaagctcgatatttgccggaataaaatcaatcccttcctcatggcggataatgccttctcccggctccacatcttcgtcattgataactttctccatgatatttactaaggtcacgtccagttcgtccggttcctgaatacccagactcaccgccatacttccctgagcgtctgcctcaaccagaagtacctttttcccggctcttgccagcccgatacctaaatttacacacgttgtcgtttttccaaccccgcctttttggtttgcgattgcgataattctgcacataaatttctacctacctttcatccttttcaattctgtcaatctctgcatagaagcgaaaatatcggttcgttcccttgtttgaaaatatctctgacacctggatcacccggatttccgggtgtttctccagaagccgtttaaaccagcgaatatccctcactgtgccttgcagcctaatcttcagcataaaacatgtcctcccaatccacgtagaaacaatagtccgggtatcggattttaattgcttcccaaaaatatctggcgtaccctgtgcagaatatatcgcttattgaataaagccgtgtttctgtaatctgcgcttctgtatccttatattcatcagttgtaggtgttccgtctgtataaaggttaaaagcaatacggacaatcttttcactcccactggtctgccatccttcctgcaggcactccggtttaataaatccagtcttaaaatcatagatccggtttgcattgcgtctggtgtcctctgaaagtcccaggcaataaataagggttttgtggtacgaatcctgacacgagcattttgaaagataggtgttataaaatatctcatgttccttgtttttaaaagtgatttttctttcctgttttacttttgctcctgtcgctgtgttccttgacatctgatttccctccattgttcatttttactaatttaactggtcattcaccattttcagatataattcatccagaaactctcgtttaatatctaacgtctgtccctgccatgtatcattttcggaatgagtaccattccataaatcttcggctacatttctccgcagatgccaatataatttacatctccgatcaatcttttgtttctctgcaatttccataaaatgatctgcactgaaaaactcatatacagatattcttaaggcgagcgccatctggcacagggcatacaacgggattttgttctctcgccggcatctggcattggtaaaccatgtatatactgtcccttccggagaacctgttactttacagatccatttaactttcctattcagatgaattccctgggctcttagaacatgattgatattttgaatgagttctcttttgtccttgttctgatgcagttttgttaatctgatgatttccttttccaatttcatttttctttgctctttacgctgtgttgttcccatttgtttttcctcctgaattttaaaattttgtataaaaaatagggacactctgctgcaagtatccctatcttctatcaatgtattgatagcgctatattcactttcataatccaggattttttgtgttccccgtaccgaggtctaaggcaaccacaacggttactttgtttacaagtaccttttccttgtgattttcctctaatctgttgaaactgaaaaagtcaacaaagtgcgtaaattcaaggatttctaggtatgtttcctttgtagtcttaccacagtctctatatgtgttgtattcccaaactgatccaccgcccttaccttacgaagttcatatccgccctcacaaagcaccttaagatccctcgctaacgtcgccgaatcacagcttacatacacgatccgctccggctgcatcttaagcatcgtctcaagacatacaccatcgcacccctttcgcggcggatcgaccacgatcacatccgggtgcagcatatctgcatctgtgtctttctttttttcataaaatgccggcagcacttcctctgcttttcctacaaaaaactcagcattattgataccgttgagcgccgcattattcttcgcatcctcgattgcctgtgggacgatctccaccccataaacttttcccgctttctgtgcaagaaaaagtgaaatcgtgccgatgccgcaatatagatcccacacggtctcttttccggtcagtcccgcatagtcgagcgcaaggctgtagagtttttccgtctggacaggattgacctgataaaatgactgcggtgaaatatggtatgcgaccgctgtatcagtcagtgaaaaatccttcgtatcgcgtagatggatcatatcggtaatgtatggatcgccccagatacatttcgtcacatccccgaggatcacatttgttttcttcgtattctgattgatggaaatgctcttcattccctcgatggctgtcaatctgtcgatcagtttttccactttaggaatactatttccgttgataatcacacagaccataagctcttttgtggtaaacccatagcggatcaggacatgacgaaccagccccttacctgtattttcatcgtaagatgccacatgacattctttcatataagaaaggacttcatttaaaataatctgattttcctccacacccagtttacagtcattgaccgggataatactgtgggtacgcgctgcataaaaaccggcaaccggattcccatctttatccgcaccgatcggaaactgtgccttgttccggtagcggtatggctctttcatccccacgacaggaagcatgattcggtcgatcaattccggcgcaaaaccgccaatacgaatcagatttccgcgcactttgttctgcttaaattccagctgcttttcataatccaacgcctgtatctgacatccgccgcatctcctgtgaagttcacactgtggtgtcacacgaaatttagacggcgataaaatctgctccactctcgcataaccataatttttcttcatctttgtgatgcgggcttcgatctcatctccaagcaccgcatctttaacgaaaaaggtcatgccatcgtattttccgattccttcgccgtccacgcccatatcttcgattttcagttctatgatatcatttttctgcataattataatttcccggagcgtctgatattgctctcaagcagacggttgtacccctgccattcctgattattttccggcacgttgttaaagatttcgcgcaccgtctccatctttgcatcgatattatccgcaaaactgagtgctaatgcctccggcagcgccggttttttcggtgaaccaaactctaactcgccgtgatgtgctaaaatacagtgctttaactcgcttgccagtccctttggaaaatccgggatcgtgcggatcctgtcaccgaccatctcggttccgataataatatgtcctaaaagctgaccgtcatccgtgtaatcattttccgggaatgtggaaagctcctctaattttccgatatcatggaaaatagctgccgtgatcaaaagatcgcggtttaacatcggataacagcctgcaaaataatcacagtgctttgccacacttaagctgtgctcaagcagaccaccgacaaatccgtggtgcacagtctttgcagcagagtggaatttaaagcgtttttcaaaatctgtatcttccacaaaaaagctctctaacagcttctttaaatgcacttctttgatgctcgcaatcaggccttttaactcctcatacatctggtcgatatccttatcgctgaccggaaggtaatcttttggatcatactccccttcctgcaccttgcgaacacgctttacattcagctgtaaattgccctgaaagctggtgatatcacccattacggctatgtaatccagtgaatcgaactcgtcgattccaacagaaccaggctcccagatcttcgcatccagtgtgcccgttttgtcctgtaagatcaatgtatcataaggttttcctgcctttgtcagtgcagactgttttactttacatagatagatttcattaattcgctcgccctctctgaggctctcaatatacttcatactactccttattcctgcttttattttctaaaattattatgcctgtatccgcatttctgcttctaaaacgcataccggtgtccacatttctgtttctgacatgcatggccgcatccgcatttctgcttctaaaatacatgcctgtatctggttcacatctctatggcagtacactgacttctaccgtgcagatgatttccgtataaccttccggtccctgccgctcaatcttcacttccaccgtatcttccggctttaacgaaagcagttttttctcataattttctgccgtaagaatctcatccccgtcaatctccgtaatgacatccccattctgaagtcccgccgccattgccggtgaatccatgcagacatctttgatataggcgccttttggtatttcatattcacgttcgatcgccgcagtaaccgttgtcacttcaagcccgatgcacggaatatcctgtccgtttgacaacatctcaatcaatgcctttaattcagaaatagaaatcgctgtcagcgtattctcatcgcctgcactgctgtatccctgcatcacgatcccgatgatctcaccatccacattgacaagcgcaccgcttccattgctgcttccgacaatatctgtcgtaaatacactgtaattatgatctatcgtggaaatactatttgtcgtagatgtgatatttccagtcaggattgaataatttgttccaagcggacttccgattgcaatcgcaatcgttccctgcgcaacagtcagtgaattgccaagaactgcaaccgtgatcgcattctttgtactttctgtaagctccgaagtctttacgcttaacacggcaatccctgtattgccatcgtattttttcatctcagctttcactgaaacatcattaataaatgtaacgtagatctcctgggcatccgcaatcgccttgcgctctgtcaaaaccagaagttctctgctgttctccgctacaatgattccggaggcctgacctttgctctcatacggattattaaaccagtcggtgtcactctttacgccggttacagtcacaatagacttattggcttcttttccaacggcatataacttgttctgcagcttctgaaaatcagcaagttcaagttcccgcaggtcattgtccggaacattctctccggtctgctctgtttccgtttcacccgtctgttcctgctgtgagtttcccacttctccattttcctgcgatccgttgttctccgctgccccgttttctccctgctgcccgtcgttctctgtctcctgtgtatccttctgttccgacgcttcctgtatatcgccctgacttggctcctccgtttccgtgacatcatcttgcggaatcgtaacaaccggcttctcctctgggtaaaaccagtttgaaaactcaggctgcagtaaactaaacaccagcgcagccaccgcaccaaaaattacggcaagcgctaccgtaaacaatgctttttttacaagacgttttttattcaacggcttctccttgatctgttcattaataaaagaaaagccacccttctctttctcctgcatgattttcccttccttaacaaaaatgaaaaccgcacctagtttattatagtttgaaacacatacgcttgcaacactattttttgcatttccggctttcattcccctaattaatgggatataatgtgaattagcaatgagcagtgccaaatgagggaaaaataaaaaaagactgcttgcaggctcttttttgtttttttctcatttgatagggcgaatgcccgtcagcccggaaaatctctgatttttcgggctggcactgcggactaaagtcgaacacaactccccgtcaactcagcgcaatctctgatttttcgggctggcactgcggactaaagtcgaacacacatatccgtcggcatgctgccactgcaaactaaattttcaaccacaaggaattacaaatcatatgaatgaaaaagttttaaaaacattagaatacaataaaatcatcgcacgtctcgcggagcacgcttccagcgaggacgcaaaaaaacgctgtcttaccctcacaccaggcacagacataaacgaaatcaaccttttacagttacagaccaaagatgccctaaaccgtctctttaaaggcgggcgcatctctttttccggtgtacacgacatccgagactccctgaaacgtttagagatcggtgcatccttaagcatcacggaactgctgcgcgtctgctctctcttagaggcagcaaaacgttcaaaagcattttcccgcaccagcatcggacacaccggaccggaccgtcctgccgcagcagacgggacagacgaacttccggtcgactcactgaccggatttttcgatcagattgagccgctcacaccgttatgcgatgagatccgccgctgcattttatcggaggacgagatcgcggacgatgccagcagtacgctccgctccatccgcaaatccatgcgtggcatgaacgataagatccgcgcacagatgaactcgatgatcaacaacacgaccacacgcagctatttacaggatgctgtcatcacgatgcgcgacggccgctactgcctgccggtcaaagccgaggcaaaatcgcaggttcctggtatggtgcacgaccagtcctcctccggttccacgctctttatcgaaccgctcgctgtcgtaaacttaaacaacgaatacaaagcgttactgatcaaagaaaaagaagagatcgaagtcatcctcgcaaacttaagcaacttaacggcaggatactccatgcagcttcacaccgactataacgtactcacggaacttgattttatttttgcaaaagcagccttcgcacagacttacaatggtgttgccccgaccttcaacacagatggacggatcaatatcaaaaaaggccgtcatccactgctcgacgcaaaaaaagtagtgccgatcgacgtgcgcctcggagaagattttaccctgcttatcattaccggtccaaacaccggtggtaaaaccgtctccttaaaaacagtcggccttctgacattgatgggtcaggcaggacttcacatcccggcttccgagcgttcggagcttggaatttttgaggaagtgtttgccgacatcggagatgagcagagtattgagcagtctttaagtacattctcctcccacatgacaaacatcacccgcattttaagccaggtcaacgaccgctccctcgtgcttttcgatgaactctgtgccggaactgacccgacggagggtgccgcacttgcgatctccattttatcgaaattaaaactgtacggtgcgcgtgtcatggcaaccactcattacagcgaattgaaagtatttgccctgcagacctccggcgtagaaaatgcctgctgtgaatttgacgtggaatctttaagcccgacttaccgtcttttaatcggtattcccggaaagagtaacgcatttgcgatctccacgaaactcggtcttggtgaagatatcatcgaggacgctaagggacggatcagtgaaaatgacatgaattttgaggatcttttagctgaccttgaaaagagccgtatcacgattgaaaaagaacagcttgagatcaaccagtataaagaagagattcagaaattaaaagaacagcttgagcagaaacaggaacgcttagacgcaagccgtgacaagatcctgcgcgaagcaaatgagcaggcttacaatatcatcaaagaagccaaagatcttgctgatgaaacgatccgcaatttcaataaatacggcaccgcacacgctccggtcagcgaaatggaaaaagaacgtaccaaactgcgcgataagatgaacaacgcacagaaaaaaatgtctgaccagaaaaagaatgctgcgccgaaccataagattccaaagaaactccgcattggcgaccgcgtcaaagtcatcagcatgaacttaaacggaaccgtgcattccctgccaaacgcaaagggtgacctttatgtacagatgggaattttgcgctcccttgtcaacatcaacgaccttatcctgttagaggaagaaacttccccgaccagcaaaaaatacggccgtaccggtgccggcaaaatcaaaatgagcaagtccgcatccgtctccacagagatcaacctgatcggcaagaccaccgacgaggcgatcgctcttttggataaatatttagatgatgcctaccttgcacatattccgtctgtccgcatcgtccacggcaagggaaccggtgcactgcgcaatgccgtgcaggcgcatttaaaacggctaaaatatgtgaaatcattccacctcggcgaatatggcgaaggtgatgccggcgtaacgattgccgaatttaaagactgatttcagacaaaaagtaatttcagtaagacagattttatcccatgcacaaagcactgccgaagcaataccagttcgtctgatttacaaacagaatacacaactaacaggaggtaattttatggcagcaaaacaaaaaatactgatcgtcgatgatgataataatattgcagaactgatctctctttatcttacgaaagagtgttttgatacaaaaattgtaaatgacggtgaagaagccttaaaagcatttgaacagtacaatccgaacctgatccttcttgatctgatgcttccgggcatcgacggctatcaggtatgccgcgaagtccgtgcaaaagcgaatgtaccgatcatcatgctctccgcaaagggtgagatttttgataaagtactcggtcttgagcttggcgcagacgactatatcatgaaaccgttcgattccaaggagcttgttgcgcgcgtcaaagccgttttgcgccgttaccagcctgtcaaagtcgaagagccagcgccggaattaaaatgtgtgaaatacccggatctgatcgtcaacttatccaattactccgttatttataaagataatccaatcgatatgccaccaaaggaattagaacttttatatttccttgcatcctcgccgaaccaggtatttaccagagaacagcttctcgatcacatctggggttacgaatacattggtgacacccgcaccgtggatgtccatgtaaaacgtctccgtgaaaaaataaaggacaatgacagctggagtctctcgaccgtctggggcattggttataaatttgaggttaaaaatatatgaaacggacactctaccccaaactgctcggcggctatctgatctatggactgatctgctttattattatttcaacctttggttaccacattacgtttaacttcttagagcgccgggatgcctcgacgctctaccgggagtctgcgctgatttcctctaactatgcggaaaactattttaagcgttccacaaccttagaggaaatgaaaacacagctctccaccctaagcacttacctttccagcgaaatctggatcatcgataagcagggacagatccttttaaacacagcttctgctacttctccagtggaaaatgcagagccggaagtaattcctgattttgacgtaaccgattttggaagtaaatattaccgcactggaaacttttacggtcattttgacacggaaactttaagtgttttttcgccaatcactgtaaattataaagtacgcggctatgtgatcatacataaaccggtcagctccatcgtcaatttatccaaccagctgacaaatctatcctaccagacgtttgcacttttatttttggcagcctttgtcgttttagcgctttttacctggatcgtctatatcccgatccgcaaaattgcgcagggtgccaatgaatatgcctctggaaatttcgaggcaaagatcgatgtccattccaacgatgagatcggttatcttgccgcctcgctcaactatatggcaaatgaactgaacacgctcgaggaggatcagcgaaaattcgtatccaatgtctcacacgatttccgctccccgctgacctcaatcaagggctatgtggaggcaatgctcgacggaacgatcccggtggaaatgcaggataaatatttaaacatcatcctgtttgagacggagcgcctgaacaaattaacgaagagccttctggaattaaataaattcggttcacacggtgtcatgctcgatatcacaagctttgatatcaatcatacgatccgcatgacggtacagacttttgagggaacctgcatggaaaagcatatcagtttcaacctgatcttaagcggcgaaaccctgtttgtctccgctgatttcagcaagatccagcaggtactttataacctgatcgacaatgcgctcaaattcagccacgcaaactccgcaatcacgatcgagacgaccgaaaaaaatgagaaagtctttgtttccgtcaaagacaccggaatcggcattccaaaagacagcatcaaaaagatctgggatcgtttctacaagacagacctctcccgcggaaaagacaagaagggcaccggacttggactttccattgtaaaagaaatcatccaggcacatggagaaaatatcaactgtatcagcacggaaggcgttggtacggagtttatctttacgctgccgttggcaaaagagcagaaggagcatgcctagtggcatgctcctcctgctgcataacagagttgttaaaattcaactttctcatttttccttatttcattaacattgcttttgatattcggcacacaatctttctaataatttaaaatcacaactgttatttacaatacttggatttactttatttatgactttggagtaagtttgttttgctttatttcttatgcgagtttcattctcattacaaaatttccactccagatttaacaagattttattaggatcatctgctattattctttcatttatacattcatccggaaccggaaacatataattaaaccgcagtgaccctttcactttgttatagcgttcagattcaatgtttatcaatatgttatccggtttttgcattttataagatgatactggaacataatatttatatccatgaacatccaaaactactccacatgtaaacttaggcaaatttcttggatattctatattgggaaccctggtaaatcccctctcattcctttctccttcttgtaagtatttaacgtattctttatctatatcgtaaaatgataatgccattcttcctcccaaaaaacaatattgtcatacatcaacataaactgtctcattattatgaactatgaggattacgttttactcgtctatcatattatcacagtggttctatgtcagtacttgtcaaatcttcacaccccaacactcgattaatttttttcatgactcataaactaaataagagatggcaagccatctcttatttatccattataattcgctctcaaaagcggcgaagcactctaacattataactcgctcttaaaaagtggcgaagcactccaacatatataattcgctctcaaaaagtggcgaagcactccaatattatagaataactatcttttcaacaattattctctatgtttatagtacgataaatttcattaattgtcaattactttttgtactacatctttattttaccttcctacttctttttcttccctttcacctccggcagctcctcatacatcgcaacgaacaatccctgcaaaaactctttatcatccacctcgtctaccagcaacatttcttttgctccctcatacggcagttcataggaggcttccggcatataggaaactgccgcctttaccggctttaccaacaacctgtcatcatagatgccaccgacaatcttaccgcggtaatagataataaattcacccatcatagcccggtacgagatctcttccaactccgctaactgtcctaaaataaattgcaaatattccttgcttgatgccattttccacctcattttccctttttaatctccggttatttctgtgtcaccgatctgctttctctgatcttttcagttggacgttggatcattgttttccacttctaaccggatgccggatcactgttttccacttttccggggcaattttcctcgcatccgacagatatatttcatgatggaatctggtatcattcatgtcatcttcataaccatttttcaataaaaactcatccatcaacgcgaccgtagcaggttcattattgaaagaaccaacatgcatgatctgcacgcaaagtccttcttccagttcaagaaattctacctggctgcagtctgtttccttcttttttgacgcagtctctattgcccagttgacgtctgcttttgtgataaaatcagggatgcggatcacagaaatccagtgaaatgcacgcttgtttccataatctatttcttctgcatgctcctgccaccagaatccttccagaggcggaacaacatattcaaagaatccctttatcttgtaatctgttttgtaactcatcttcaatgtatatgccactgcgtacagagcaccgattgcctgctgatatactcctccttcttcatttggatctccctttccacggacagcgatataactcattttgggtaccttgataatctccggttttcttttgggcagataaaactctctctgttccttcttaaaatcaaacgccatcctactactccttccaagatccaaccttatggaagttttcattataccattttttcatagctggtctcctccatatttttttgcaatattatttgcgatgtggaaaagctcctccctgacatcctccggctctaagactgtcacctgatccctgccggtaagcatccatgcgataaggctgtccttgtcggtatatttatgttcaaagagcagcgttccatccggctgtacctgaaacgaatcaactccaaactcctcaatcagatgccatttcatagacggctcaaacactgccttcaccatgatccctcccggaaaaatcctttccgttgacagatccggcattggaacatcccgtttttccacttccttttcagtcagcgtaattgcatccatccggttcagtttaaacatccggaaatcttttctgagcctgcaaaatccccatacataccaactgctccattgaaagatcagataatatggttctatttctctgctgctgtcaccgtttggtgcataatagttaaacgtgattacctttcttttttctattgcatcctggatcagctcaatcttcaaagccagtgaatccttgtaccaggaggacagatcaattaatatcgactcacttccactcacaaattcggaagaaccagccttgatcttctccattaactgaccatagtaatgactgccgctcacgctgtcaaggctgcgcagaccagccagaatcatctgcatatctttggatgtcagaatcgtccggtccatcctgtaaccatccatgatacaaattcctccgcctgtcccctgtgacgtacagacaggaatccctgccttacacaaagcctctatatccctgtttatcgtccttctggacacctcaaacatttctgccagttccggtgccgtcaccttttctctctgcaacatcaccgaaagaatcccgatcagtctgtctatcttcataccattccccatccttgcatctttgcataacaggtttgggagtaagtatctttcccacatcctgtcccatcataccattacaaacgcgacaactatatgtcatgtttagaataacattttccaacatatatgaacaggctccagctggaaacttcgtatgaaacaaattctcttatataaatacttcgatagcaaatttagtttctcttattttcgtacaacgaaacaaaaccaacacagctttgtacaattatctcttcaaaaactaaaaaacagcattttacctcaacatcatatagatttggatatcaaaaggtggttcacaacttatcgattggaaaattgcaccaagccgagactcgttttgtaactttgggagaaaattagaaaatcttagtttgcctgtcgatttacagtgatgttctgccacggatggcagaacaaggcagcatcgagtcatggatgactcgttgttgccgttcacgtcactctaagaaacttcaaatcaggcaaacttagtttttcttattttcatacaacggcacaaaacagcctcggcttagtgcaattttccactcaaaaaactgaaagccaccttttggtatccaaacctatctaccacacacaaaaaagccagcccagtctgcatcatctgcagcctggactggctttcttcacgttcatatattttggatagtgattaaactaactcaagtaatacctctaaagcgccatcaccttttcgctgaccaatctttacgattcttgtataaccaccgttacggtctgcatatttcggagcgatctcatcgaataatttagcaacaagatcaacttctttggtgtttttctttcttccggcagcttcagtcggaacttcttttacggtgtagagaacttttaacatctctctacgagcatgaagacgggatggcttatctttcttgatagtcttctcaacttcatcgtatacagtaactttcttaccgtctacaacttcttttactctcttaccgtctttatctttgcgggcaacttttgcttttacagtaacttcttcatagttgtctttctcttttactgctaaagcaatgattccctcagcgattttgcgaacctcttttgcttttgcttctgtggtaacgatcttaccattgtttaataatgctgttacctgacctcttaataaagcttttctctggctagaggttctgcttaatttacgatactttgccatttttaatatcctccattttgtggaacatccggccacgcgctttggacttacttaccggccgccatattcttgtttcggagtggttctgtgataccgcacagtgccattccaagtgccactcatgatccgtgtgtcagaatctcgtctgcctcatccctctgactgtctctgacgcatttcctcgtcaggcatatcagagcaatgaatgcatacactccgcacaccagacatactccatgccatatggacttactgtttctgcctgtatcggggaatataaagcgctcgctttactcctctccctggtttaactgaagtcctaactcttttaatttggcgagaacttcctctaatgatttacgtcctaagttacgaaccttcatcatatcttccggtgttctgtttgtcagttcttcgactgtgttaatgccggctctcttcaaacaattataagaacgaacggaaagctcaagttcatcgatattcatctcaagaactttctcttttgcattgtcctctttctcgatcatgacatcagcctgctgagcagcttcggaaagatcgatgaaaagacttaaatgctcgcttaaaaccttagcagctaagctgacagcctcatctggctctaaggtaccgtttgtataaacgtccaaagtaagcttatcatagtctgtaatctgaccaacacgggtattttcaatcaaaagatttactctttctaccggtgtatagatagagtcgatggcaataacgccgatcggaatatcctctgtcttattcttgtctgcacttacatagcctctgccgtttgtaatggtaagctccatgtaaagcttgcagtcaggtccgccatttaaattggcaattaccagatccggatttaaaatctgaatatcagaatcaacctggatatctgctgctgtgactacaccttcgccctcgaattcaatgtaagcaactttaggttcatttgtagagctgttatttctgatggcaagatttttgatattcataataatctcagttacatcttccttaacaccaggaatggaactgaattcatgtaaaacaccgtcgatcttaacctggcttacagcagcacccggtaaagaagaaagcatgattcttcttaaagaattaccaagtgtcgtaccatagcctctttccaaaggttctacaacaaactttccgtacttcttgtcttctgaaatttctgcgatttcaatttttggtttttgaaaatcgaacactacaaagtccctccttctcgggtaatttgcttaactattacttagaatataactcgacgataagcatctcatcaacaggaacgtcgatctgctctctggaaggtaattcttttacagttccctgtaatttctcagcgtcaacatctaaccactccggaactaatcttccgccggtaacttcaacgatgtctttcattctctgaagacctttgtttttctctttgatctcgataacatcgccagcttttactaagtaagaaggaatgttaacctgtttaccatttactaagataaatttgtggtcaacgatctgtcttgcttcttttcttgttcttgcgaatcccatacggaatacaacgttatctaatctggactctaacatggtcattaagtttgtaccagtcatgcccttcatctgatcagctttcacatagtagttgtggaaaggtttttccagaacaccatagatgaattttgctttctgtttttctcttaactgaagtccgtactcggaaactttcttatttgctctctttaactctctgttggattttttatcatatccaaggtaacttggctctaaaccaagtgatctacatcttttcagaacaggaactttatttactgccatcttcgtctttccctcctaattaaactcttctgcgttttggtggacgacatccattgtgaggtactggagttacgtctttgatgctggtaacctcaagaccacatgcagaaagtgcacggatcgctgcttctcttcctgaacccggtcctttaaccataacatctacagtctttaatccgtggattaaagcagcctttgtagctgtctcagctgccatctgtgcagcatacggagtagatttctttgaacctctaaatccaagaccaccggcacttgcccatgataaagcattaccttcagcatctgtgatagttacgattgtattgttaaaagatgactgaatatgtgcctgtccgcgttcaacgtttttctttacacgcttttttgtcactttttttgtaactttagccatatctaaactaacctactttctctaaaatataaaatatcgactgatacgaatgatttctt

SEQ ID NO: 5301 - DNA, 5069 bp, Unknown
  gut microbiota DNA sequence
tcctgaagtctcttgatattgaaagcgatctctcttcttaaatcaccttctactaactgagtctcatcgattactgcgctgattctctttacttcatcgtctgttaaatctctgacacgagtatcaggatttacgtttgctgctgcaaggatacggctagagcttgttctaccaattccgtagatgtatgtcaaaccgatctcgatgcgtttttctcttggtaaatctacacctgcaatacgagccatgtgctttttaacctccattaattcatccgatgcattctgcacctgttatattgtttcatttctcaaatcacctgacgttgtgactttatttcggaaaatcgtctgagacagctccgttgtcagcggcctgaaatgtgtgtcccctccgtctttcttcttatttggatatgtccctttatgtcctcggtatgtagacataaaaaagcagctatcccggctgtctgattatgataacagtgtgaacaaccctaccaggcgttccactgcagccgcacataatttggcgggttcctgctcattaaaatgcgcatattaccccattggcacaaatatgacaagaactaaatcaaccctgtctctgtttgtgtttcggattctcacagataattctgatgcttccttttctcttgatgactttgcatttttcgcaaataggtttaactgatgatcttaccttcacagcaaatcctcctttcttaacaaggctcttttttgtgttgttgcactgaaatatgcacgcacaaaaaggcactatccaaaagtgtccgtctaacattatagcacggacactgtttagaagtcaactattattttgtataagatctgtaataaaatcttatttgtctctccagatgattcttcccttagtcaggtcatatggagacatctcgatggtaactttatcacccggtaaaatacgaataaagttcatgcgaagttttccgctgatggttgctaaaatctgatgtccattctctaactccactttaaaaaatgcgttcgggagtttctcaacaacggttccttctacttcaattacgtctgcttttgacattgaataaatcctcctattttatgattcctgtctgccttcatttatacggcagtactgtttgattgctctttttactgtaagatctgataaattttcatccagaatctccgtaacttctatcggtaaatttttgataatctgaatatgctttgcattttttttctttggcatatccagtgtacggcttgttccatttaccagatatacagatttttcatctttttcttttataagataaatctgatttctgtcgtgtcccgacttggattttgcaaattccatttctgaaatatcctccggttcttttctctatgctttacagaattggatcattactccagattccttcggcgatttcagaatccgtaagtgataatatttccggttttccctcccggatcagtatggtattttcataatgagccgaaagatccatatcctctgtcactacggtccagtcatcatccatccatacgactctctctgttcccagatttatcatgggttccaccgctaatgtcattcctgctttcagcttaatgcccctgcggaatttgcggtaattcgggatctccgggtcctcatgcatatgtgtaccgattccatgtccacataaatcacgtaccacaccataaccaaaactctcggcataatcaccgatcgcacctgaaatatcatgcagatgatttcctgccactgcatatttcattccttcaaaaaagctctgtctggtacgttcgatcagaagtcttgcatcctcagtgatctcgccaacaccatgtgtccttgcggcatctgactgataccctttatagatcacaccggtatcaagacttacaatatctccctcttcaatgattctgtctttgcgcggaatcccgtgtacaacttcttcattgatggagacacagacggatgccggatatccctgataattcttaaaagatggttcgcatccaaaactccgaatcatttcctccccgatcctgtcaatatcaaatgtcgacattccgggttttaattctttttttaatccctcatgcacctttgcaagaatttttcctgcctggcgcatcagttctatttcctgggaagattttattgttacggccattactccggttcctctactcgcctaaaatcgcaacgatatctgcaaataccttttccatcggctgcgtaccgtcaactgtttttaagatactctgtttcttgtaataatcgatcaatggctgggtctgctcatgatatactgtaagtcttttctgaacagtctccggtttatcatcatctcttaagacaaccggctgtccgcatctgtcgcagattccctctacctttgttggaatggaaacaatgtggtatgtcgcaccacagtttaaacatgcgcgtcttccgctcatacggtttacgatgttttcatccggtacatccacatcgattgcataatccattttttcattgatcttctcaagtgcagctgtaagtgcttctgcctgcggaatagttcttggaaaaccatcaagtataaatccattctcacagtcatcctgtccgattctgtccataacaagatcgcaggttaactcatccggcactaataaaccctgatccatatactgttttgctttctttccaagctcggttccattcttgatgtttgcacggaaaatatcaccggttgagatatgcgggatacgatatttatctgcaatctgcttcgcctgtgttccttttcctgctcccggagctcctaacatgataatcttcataaaattcttccttcctgcgttgctttttacgcatctcaagatttgtgcgtaagcactaatcttgcgtgtgaaaaatcttatttttcacactaatacctccattgtccaaaataccttcatcatacaaatattgcttatataggaaagtaacgctgaactttaaaagcccagcgttgctcctctgccaatctgacttacgccgtcagattaatcatttaaaaatcctttatagtaacgaacacgcatctgtgattcgatctgttttaatgtctcaatgacaacacctacaataatgatgatagatgttccaccaaatgatacatcggcaccaaatactccgttgaagaagatcggaacgaatgcgataaatgcaagtgctactgctcctataaatacaatgtaatttaacatccggttcagataatcactggttggtttaccaggtctgatacccggaataaatccgccggctttcttcatattattagcaatctctaagggattgaatgtaattgaagtatagaagtaagcgaaagcaatgataagtacgatgtataccaccaatccgatggaataaaatggctcattcggattgcaccagtttgactgggacattccttttaaaatcttgcttccgataccggttccgtttccttttccaagaagacttgcaatgataaccggtgtctgcaacaaagactgtgcaaagataaccgggataacaccgccggtattaacctttaacgggatatatgttgactgaccgccaacctgttttcttccctgaatctttttggaatactgaaccgggattcttctctcgccgccctgtaagaatacgacaaatacgaccattgcaacaatgattgcaataatgattactgccgcaagaattcccttaggtatggattttcctgtgatgaactgctgatacagtgtacccatatcatttggaatacgggagatgatgttaatggtaagtacgatagaaataccatttccaacacctttttctgtaatacgctcaccaatccacattaatactgctgatcctgcagttaatgtgaaaataatcataataattgtaagaataccatcactctgtaacatctgacctctcttaaagctgattgccattgcgatcgcttcaattaaagcaagagctactgtaagatatctggtaatctctgcaatctttttacgtccttcttctccgtcgcgctgcatctcttccagttttggaattgcgatagtgagaagctgcataataatggatgaagtaatatacggtgtaatgttcaatgcaaagattgacatgttatagaatgatccaccggtaattgcatcaaaaaatcccattccatctgcggtctgacttgcaaaccagtttgaaaacagttcattgttaacaccaggaatcggaagctggcttccgatcctgattacaactaacatgagaaatgtaaaaataattctgtttcgaatatctttaatcttgaatgcattacggagtgtttccagcattagatcacctctgcttttccaccaagagcctcaattttttcttttgcagctgcgctgaatgcatttgcctgaacggtgagtttcttagtaagttcgccattacccagaatcttaactccatctctaggatttttaacgataccagcctcgattaatgtctctactgaaacaacggaatcgttctcaaatgcctcaagggcggaaaggttgattccgatgattgtcttagagtttctgcatttgaaacctctctttggcaatcttctgtataacggcatctgaccaccttcaaaacctggtctcggagctccggaacgagctttctgtcccttgtgtcccttaccagcagtcttaccgtttcctgaaccgtgtccacgtcctcttctgaaattatcgctatgtgcagaacctgctgctgcctgtaaattggataagtccattactgacacctccttatcttattattagatctcttctacctttacataaggtgctactttacgaagtgcacctgctgttgctgcgttatctggcagctcaacagttttatataacttattcagtccaagtgcttcgattgtttttttgttcttcggaacagcaccgattgtagattttacaagtgttacttttaatttcttatctgccatcttaaaactcctccttaacctacaatctcttcaactgatt

SEQ ID NO: 5302 - DNA, 46666 bp, Unknown
  gut microbiota DNA sequence
attatccggcagctcaacagttttatataacttattcagtccaagtgcttcgattgtttttttgttctttggaacagcaccgattgtagattttacaagtgttacttttaatttcttatctgccatcttaaaactcctccttaacctacaatctcttcaactgattttccacgaagttttgcaacttcttccggggattttaactgacttaaagcattgattgttgcaagaacaacattctgcttgttgttagatcccagagattttgtacggatatttttaataccagccagctcacatacgttacgagcaggaccaccggcgatgataccagtaccttctggagatttctttaataatacagatgcacctgtatgttttccggtaacatcatgtgtaacactgccaacctcatctaattttacagtgatgagtttcttcatagcatcttcttttcctttacggattgcttccggaatctcggatgcttttcctaagccagcaccaacatggccattgccgtcgccgacaacaactaaagctgtaaaacggaagttacgtccacctttaacaacttttgttacacgtttaattgataccactttttcgtttaattctaattgactagcatcaatgatttcacgtttcatgttttgcgtttcctcctattaaaagtctaaaccagcttctcttgctgcttcggctaatgcctttactttacctgcatatataaagccgcctctatcaaagacaaccgttgaaatacccttgtctaaagctttctttgcaataacagtaccaagcttagctgctgcttcgacgttattggtcttctctaactctgcttttacatccttatcaagtgtagatgcagaaacaagtgtatttccaactgtatcgtcaataatctgagcgtacatatgattattacttctgaaaacagccagacgtggtctcatcgctgtacctgcaagatgatgacgcattcttctatgtttgttttcgcgaactgctgttcttgatttcttactaaccatttttcgtcactcctttaattatttcttaccagtcttaccaactttacgtctaataacttcatcagcatatttgataccttttcctttgtaaggctcaggtcttctcttatctctgatttcagctgcgtattggccaactttttctttatcgataccagatacaatgattttatttccatcaactttggactcaagtccttcaggatcttccatctcaaccggatgagaatatcctaagttcagtgtgagcactttaccagctttagaagctctgtaaccaacaccgttaacctcgagttccttggtatatccattggtaacaccaacaaccatgttgttgatcagtgttcttgttaatccgtgtaaggatttcattttcttcaaatcgttaggtcttgtaacgatgatctcgtcaccctctaatttgatgtccatctcagatggaagggttctttccagagttcccttaggaccttttacagtcacatgattattttctgcaatatccactgtaacaccagccggaactgcgattggcattcttcctatacgtgacatgcccgtacctcctaaatttttttgtgacaacagatcgcatgacctgccatcgtgaatgtataattgcggcttacgccgtagttacctgattctttaagaaccttctctcccaggttgcaataacccggaagaaatgaaagttttaaataacattgtatgaaaggcttaaaatataccgaaagaaccgaaggttctttcaattttgtccgtccaatggcgggcaaaatttaccatacgaatgctaatacttcgccaccaacctgaagctttctagcctctttatcagttacgataccctggttggtagaaaggattgcgatacctaaaccgccaagtactctaggaagctcatccttgcctgcgtatacacgaagacctggtttagagattctcttaagtcctgtgatgatcttttcattcttatctgcaccatattttaatgtgatgcggattgttttgaagttaccatcttcaacgatatcatatttttcgatatatccttcatctacaagaatatctgcgattgcgattttcattttagatgccggaacatcaactgtatcatgtttagcagtgtttgcgttacggattcttgtaagcatatctgcgattggatcacttgttgtcatgatgtatatttcctcctttattaagttactgtgccgtacatgccggacacagccgtctgattaccagcttgctttcttaacgcctggtatctggcctttgtatgctaattcacggaaacatactctgcagattccgtattttcttaaaacagaatgtggacgtccacaaattttgcaacgtgtgtaagctctggtagagaactttggtttacgctgctgttttactttcatagatgttttagccattaaaattccctcctattatttggcgaacggcatattgaacaatgtcaataactcacgagcttcttcgtctgtttttgcagtggtaacgaaaatgatatccataccacgaactttatcaactttatcatactcgatttccgggaagattaactgctctttgataccaagggcatagtttccacgaccgtcaaatgcattcgggttaacacctctgaagtcacgtacacgtggtaatgcaaggttaattaaacgatccataaactcgtacattttctcgccacgcagtgttgttttacatccgattgccattccttctctgatcttgaagtttgcaattgcgtttttagcttttgtagaaactgctttctgacctgtgatagtctccatgtctttgattgcagcctctaataattttgcgttctcttttgcttcgccaacgcccatgtttacaacgatcttatcgagcttcggcacttccatgatatttttatatccaaattttttgatcatagcatctacgatctcattctggtactgttctttaagtctgctcaactgttttgcctcctctctttaattaatcgatcacttcgcctgttttctttgcgaaacgtacttttttatctccatccatcttgaaacctacgcgggtagctgttcctttgtgaagatacataacgtttgaaatgtcaacaggtccctcctgatggatgataccaccctgctgattagccatgcttggttttgcatgtttcgtcaccatgttgataccctctaccagaacggtattgttctttgtatttacagcaataactttgccttctttgtctttatctttaccagcgatcactttgaccatatcgccttttttaattttcatggttgccatatcctggtcctcctacaatacttccggagctaaggaaacaattttcatgaactgtttctcacgaagctctcttgctactggtccaaaaatacgtgttcctcttggagttttgtcatctttaataataactgctgcgttttcatcaaatttgatataagaaccgtctttacgacgtgcaccttttactgaacgaacaactacagcttttacgacatcaccttttttaacaacaccgcctggtgttgcctctttgaccgtagcaactactacatcaccaatattcgcatatcttctagtagatccacccataacacgaataacgagtaactctcttgctcctgtgttatcggctaccttaagtctactttcctgttgtaccatgcttgtagcctcctttaattattttgctctttccatgatttctacaagtctccatctcttatctttcgataatggtcttgtctccataacttttactttatcaccgatcttacattcgttattctcgtcatgagcttttaatttgtatgttttcttaacgatcttgttgtaaagaggatgtcttacgttatcctggattgcaacagtgattgttttatccatcttgtcgcttacaacaataccaacacgtgtttttctaagatttctttcttccacgaccgattaatctcctttctggaatcctactgcgcaactttttctttctcagtaatgattgtctgaattcttgcaatattctttcttacttctttgattctgcttgtgttgtccagctgattcgttgcgttctggaatctcaaattgaaaagttcttttttagcttctactaactgcgcatttaagtctgttacagactggccttttaattcttctaaatatttactagttttcatttgatacaccgccttctaaatctgcacgtgaaactactttacatttgcaaggtaatttgtgtgtagcaagacgtaacgcttctttcgcaacgtcttccggaacaccggagatttcaaataatacacgacctggtttcacaacggctacccagtactctggagcaccctttcctttacccatacgaacacccataggtttatgagtaattggtttctctgggaaaattttgatccaaactttaccaccacgtttgatatatcttgtcatcgcaacacgggctgcctcgatctgatttgctttgatccagcatggctcagttgaaataataccgtactcaccataagtgatcgtattacctcttgttgcctttccgctcatagaaccacggaactgtttacgatgttttactctctttggcattaacattactgtactcctccttccttattagctcttgtcggaagtacctcgcctttgtagatccaaaccttaacaccaactttaccgtaggttgtatctgcctcagcgaatccataatcaatatcagctcttaatgtctgaagcggaatagttccctctgaatagaactctgtacgagccatatcagcaccgccaagacgtccggaacaggatgttttgattccctttgctcctgatttcatggttcttcccatgcaggatttcattgctctacggaaagaaacacggttctctaactgtaatgcaatgttctcagctactaactgagcatcacgatccggtcttttaacttctttgatatcaacaactaatttcttatctgtgaatttctgaacttcgcctttgatcttctcgatctcagctccgccttttccgattactacacccggtttagctgtgtagatgataactttcacacggtcagatgctctctcgatctcgatcttagaaacacctgctgcatataatttctttttcagatatgttctgatattgtaatcttctactaagaaatctgcaaaatctgcttccgcataccatttagagtcccagtctttgataacgccgactcttaagccatgtggattaactttctgtcccatatttgacctccttatttctcgtcaagcacgattgtgatgtggctcattctcttctcgattctgtaagctctaccctgtgctctcggtctgattctcttcattgtcggtcctttatttgcgtagcactctgcaacataaaggttttctgctttcattccattgttgttctcagcgtttgcgattgctgactctaataatttctttactaagcttgaagcatatctcggattgtatgttacgatagctaatgctgtctgaacatcctttccacggattgcatctaatacgaaacaagctttctgaacagacactcttgcgtaagataacttagcggaaggtctggtatcttttacttcatttctttctcttttaatctgacttctatgtcccttagccatggatgaaacctcctttcaaatatcttatctaacgcctgatttcttttcgtcttttccatgtcctctgtaagttcttgttgcaacgaactcaccaagtttatgtccaaccatatcttctgttacatatacaggtacatgttttcttccgtcatgaacagcgatggtatgaccaacgaactgagggaagattgtagaacgacgtgaccatgtcttaataacagatttgtcaccagatgcattcatagcgtctacttttttcagcaggctggcatcagcgaatggtcctttttttaatgaacgagccataatttacctcctattttgtcagtcccctttacacactgccgtgtgtttcctcggactccgaacatcttgtttattatatcagagattaccggaagaagcaagcaaaacttctcccggttttctaattttttattatttttcaaagaccggaagaaacagtttctgctcctcatccagtcaccgttgcaatttcaaaaaaacatatctgtttttatcagttattgccacgaaccggaagaagcgctttctgcttcttccaagccttaaaataataagccccagcttattattttaaggctttaccatctctacgtcttacgattaacttgttagaagctttattcttctttctagtcttaagaccaagagcaggtttaccccaaggagtacatggacccggacgtccgatcggagcacgtccttcaccacctccgtgtggatggtcattcgggttcataacagaaccacgaactgtcgggcgaacacccatgtgacgtttacgtcctgctttaccgatgttaactaagttgtgatcaccgtttccgataacaccgattgttgcacggcattttaaaggtaccatacgcatttcgcctgaaggaagacgaagtgttgcatattttccttctttagccattaactgagcgctcataccagcggaacgaactaactgtccgcccttacccggatataactcgatgttgtgtacctgggtaccaaccgggatattctcaagtggtaagcagttaccaacacgaacttctgcagttgcaccgctcataactgtcatgccgtctgttaaaccagccggagcaaggatatatgctttctcgccatctgcatagcagatcaaagcgatgttagctgttctgttcggatcgtactcgattccgactactttagccgggattccgtctttaccgtttctcttgaaatcgataactctgtattttcttctgttgccaccgccatggtgtcttacagtgattttaccctgattgttacgaccagcgttcttctttaaagaagttaccagtgatttttccggtgttgtttttgtgatctcggagaaatcagagccagtcatatttcttctggaaggtgtatatgggttatatgtcttaattcccattgttgttctcctttcgatgtttgttatcgcgcatcgctgcgcttagtttgctatctaaagtatatcttacagtccagcgaagatctcgatatctttgctgtcttctgttaactgaacgatagctttctttgtcttagcagtttttccataaaccatgccacgtcttttgttctttccatccatgttcatggtgttaacgctggcaacttttgtgccctcgaacattttctcaactgcttctttgatcatggtcttatttgcttccggatgaactaagaaagtatatttcttctcagccatagctgccatggatttctcggtgataaccggtttgaggattacatcataatactgtacgtttgccattatgcatacacctcctcgatagtcttaacagcgtcttttgttacaacaactgtatcatattttaatacatcaaatacgtttaactcgtttgtctgagcagttttaacagtcggaacgttgcttgcagatttgatcacgtttgcatccatatcgtttaatacaactaatgctttctcaacttttaagttgttcagaacctgaacgaagttctttgtcttaatggagtcaagttttaactcatcaacaacgatgaacttgctctcatttactctggatgtgagtgcagattttaatgctgctctcttctcttttttgtttaatttgaaagagtagtctcttggtaccggagcaaatacaactccaccatgagtccactgtggagctcttgttgaaccctgtcttgcatgaccggttcctttctgtctccatggttttctaccaccaccgcgaacttcagaacgtgtttttgctttctgagttccctgacggttatttgcaagctgctgaagtactgccatgtgtacaagatgctcgttaacttctactccgaaaacagcatcgtttaactccaggcttcctacttctttgccttccatattataaacagctacgttagccattgttgtttcctcctttcctatctaagcactatttacctgcttttacagtttctttgattgttaccatgcatttcttagcgcctggtacagcacctttaactaagagcaggttgttctcagcgtcaactcttacaacttcaagattctgtgttgtaacttttacgcttcccatatgtccaggcattccttttcctttgaatacacggctcggtgaagaacatgcaccgttagaaccctgatgacgatggaatttagaaccatgagccataggacctctatgctgtcctaatctcttgatagcgccctggaaacctttacctttggaaattgcagtagcgtcgatcttgtcgccctctgcaaaaatatcagctttgataacatctccaagtttgtactcgtctgcgttctcaaatttgaactctctgacatatctctttccggatacaccagcttttgcaaagtgtcccatctgagctttgtttacgccatgtctgtttctgatttctttcttaccatttgcatctttgctgacaactttttctttcttgtctgcaaatgcaacctgaactgcgctgtatccgtcgttctctacagttttgatctgtgttacggagcaaggaccagcttccaatacagtaaccggcactaatacgccgtctgcgttgaagatttgagtcattccgacttttgttgctaaaatcgctttcttcattcttttacctcctgtttactctacagcggaacgcttcatgcccatcgatgtggggtagcggaaccgttcatcctagaaagtccatataagtggatgtggaaaaccacatagaatggaggctgatgccgaacattctttgcttctatataaaacccttcaggatattaacaaatttgtttgaagaattatttgttcttcattttgatatcgatgtatacaccagccggcatctctaaacgagataaagcatcaactgttttctgagttggtgttacgatatcgatcagtcttttatgagttctctgctcgaactgctcgcgggaatccttatatttgtgagtagctcttaagatagtaactacttccttcttagtaggaagaggtaccggtccgctcacctgtgatccgttcttctttacagtctcgatgattttttttgctgatgaatctactaattcgtgatcataagcttttaatgtgattctcattacttgacttgccataaaaaaagtcgcctccttttcgcacttttgcaagcgataaactcgctttggtacgacaagcggtgactgcacacattcccgtgcgtatcatgagcttttacccataaaaagaaacttcttcgcaccatcgaatgcttaaagttcttctgacagccttccggtctgcccgcacgttgtttctactttgtagatgttactcgtatacagtgacttgtcgccagtttcctaacttgacattcgctccacggaaaacctgccatatcggcagcaacctcacgcttctacgctatcaatgtcacagcactgcttagtatatacgataattttgtgaaatgcaagtattttttccatttttctttcatatttttttgcggctttctttgtcaatgtaaaccccgtctttccctgccactctttccttttttattctgctaatgttttatactttttgtggcttttctgtgcgcatatgatataatgaacgcaagtgagtcaacatgcctgcatgattgacgaacggtgaattggaacatgtgctggttttgcacatgctataatgtgcgtaagtaatgagcagtgccaaatgagtgaaaaacaaaaaatgactgcttgcaggcacttttttgttttttgctcatttgatagggcggtgctaggtgccggtggcacctgtttagcacggaccgaagtggaacgtagatgcccgtcagaccaggaaatctctgattttctggtctgacactgcgtactcaagtacattcaaatcagactattattagaggagttaccatatcatgaagatcattatcgtaggctgtggcaaggtgggctatactctcgtagagcagcttggcagcgaagaccacgatatcgtagtcattgacgagaaaccggaaaaggtttccaccatcacaaataatctcgatgcgatgggcatcgtaggaaacggaatcaaccaccagactttaatcgacgccggcatcacaaccgccgaccttctgattgccgtgaccggtgacgatgagaagaatctgctctgctgtgtcatcgcgagaaagacaggccactgccagaccatcgcgcgtgtacgaaatcctatatataataaggaaatagaatttttaaagaaagaattcgggctggcaatgatcatcaacccggaacttgccgctgcaaacgagattgcacgcattttccagtttccatctgcgatccgtgtggatacctttgccaagggtcatgtagagcttcttcattttaaagtaaccaaaggctctccgctgatcgccttaaaactgtttaacctgcatcagacattgcacagcaacgttctggtctgcaccgtcatccgtggggataaagtcatcattccaaacggtgattttgaatttcaggaaaacgacgtggttgcgatcgcatccgagcgccgcaatgcgatcgactttttccgcaagatcggcatcgtgaaaaaccgtgtcggaaacgccattctcgccggtggcggcaaagtgtcatattatctggcaaaaagtctgctcgcttccggcatccgtgtgacgatcattgaagtagaccgcgaacgctgtgacatattaagtgaactgctgccgcatgccaccgtgatctgcggggatgcaactgatcagaatcttcttttacaggaaggtcttgaacatgcgcagggttttgcagcgctgaccggattagatgaggagaatatccttctctccctctatgcaaatgatatctccaacgcaaagaccgtgacaaaaatcaaccggatcaatttccattcggtcatcaacgagctgaatcttggaagtattatttatccgcgtatcattacgtcggattacattttaaaatatgcacgttccacttataattccaaagacagcaatgtagaaacgctctataaacttgcaaacggtaaagccgaggctttggaatttattatcaaagcagactccgccgttgcaggaattccactcgcagatctgcatttccgaaaaaatactctgatctgctgtatttaccgcaatggcaaagttattatcccgagtggtcaggatatcatgatggccggtgactctgttttagtcgtactatccggttaccgcatttccgatatcaaagagattctggaggactaggcggcaatgaattattcgatcgttttatatattttaggctgtgttttaaaatttgaaagtgcctttctggtacttccagcactggtcggactgatctaccgtgaacatgcttctgtctcctatctggcagttgcagttttatgtctgacactcggtgttcttctgactcataaaaagccacgttctacaaatctctacaccagggaaggttttgtagctgtcgcactcagctggatcatcatgagtattttcggtgccattccttttgtgctgaccggagatattccgttttatgtggatgcactgtttgagacgatctccggttttactacaacggggtcaagtattctgaccgatgtggagagcatctcaaaagccagcctgttctggcgcagtttctcccactggatcggcggtatgggagtgttcgttttcattatggcgatcctccctatgatgggcggctccacgatgaacctgatgaaagcagagagccctggcccttccgtgagcaagctggttccgcatgtgaaagataccgcaaaaatcctttacggcatctatattgccatcacgatctgtgaagcgacgattttgcgtgcactcggcatgccgttatttgattcgctgacgactacctttggtactgtcggcaccggtggattcggcatcagaaatgacagtattgccggttattcccctgcgatccagattacgatcacagttttcatgatcttaagcggtatcaattatactgcctatttttatatactgacaggcaaaataaaagaactctttaaaattgaagaagtccgctggtatctcgcgatcatcttcggatcggtggctgtcatcacatggaatgtccggtccttgtatccgacgttcagcgagactctgcgccatgcattttttcaggttggctccattatcacaacgaccggatatgcgaccacagactttgatctctggcctgctttatctaaaactctgttggtaacactaatgtttatcggtgcctgtgctggaagcacaagcggcggtataaaagtttcccgtatcctgatcttactgaaaacgatccgtaaggaactttcactgatcatccatccgcgtcaggtaaaaaagatccgtatggacggacatccggtcgatcacgaaaccttacgttccgcgaacgtatttctggtcgtttattttgtactgctgctgacttctatgctcctgatcagtgtggatgagtttgatttttcaacgaattttacttccgttgtcacggtgttaaataatatcggccccgggttaaatctcgtcggtccgacacagaatttttcaattttttctccgttttccaaatttgttctgatgtttgacatgcttgccggaagactggaactgtttccgatgatgattcttttaatgccatcaacctggaaacgcaaataatcggatatgtgatgcagacattcgatcgtcatgaataacagaatcacaaaatgactatgaaaggatttatttatgtggattgcaaataactggaaagattatgaagtaatagactgctcctgtggcgaaaagttagagcgctggggtaattatacgcttgttcgcccggacccgcaggtcatctgggatacgcccaaaaaagaaaaaggctggaaacacatgaacgctcactatcatcgcagcaaaaaaggcggcggtgagtgggaatttttcgatctgccggagcagtggagtatccattacggttccctgacattccagctgaaaccgttcagttttaaacacaccggacttttcccggagcaggcggtaaactgggactggttttccgataagatccgttcggcaaaacgcccggtcaaagtcttaaatctgttcgcctacacgggcggtgccacacttgccgctgccgctgccggagcttcggtcacacatgtggatgcctcaaaaggtatggtcacctgggcaaaagaaaacgctgcatcctccggtctctcggatgcgccgatccgctggatcgtagatgactgtgtcaaattcgtggagcgtgagatccgccgcggcaatcactacgacgcgatcatcatggacccgccttcctacggaagaggtcctaaaggtgagatctggaaaatcgaggaatccgtttatccgctgatcaaactctgcgcccagctgctgacagacaagcctctgtttttccttgtaaattcttacacaacgggacttcagcctgcagtgctgcgctatatgatcgccactgcgttagaaaaatatgacggaaccgtcaccgcagatgagattggactgccggtgtcctccaatggactggtgctgccttgcggggcaagcggacggtttgaggggaaataaagactaccctgattttttatataactttctcaaaaaaaggagttctgcatcaacaaaagttgttgatgcagaactccttaactttttacaacatcttcttcttccgaagcaccagcatcgtcacaatgcaaatcagcagtgtcagaacacagatgatcagaaatccgtgcggtgtatttgcaaacggcatccatttttcattgacattcattccatagataccggaaataacagtcgggattgccatgacgatcgtgatggatgtcaggtatttcatgacattattcagacggttatcaatgacagatgacatcaattctctggtaccattgataatatcacggtaaatggatgtcatctcgattgcctgccggttctcgacaataacatcacctagcagttccttgtcctccgggtactgctctaagcgcttatacctggtcagtcggtctaagaccacgccatttgcacgcagggatgtcgcaaagtagaccaacgtagactctaattcgtgaaggtcgatcagatcgatatcctctgtatttttgccgatccgctcctcgatctccgttcttttcttatcgatgacacgcaggttcatctgatagtttgtcgccgtgcggaacaaaatctgatatacaaaacgcatttttttcttcgtgctgaactctttcacacggttgttgacaaagttctgcaataccggtgtatcatcggtacagactgtcacgatcacatcctgcgttaaaatgataccgagcgggattgtcgtgtaactctgtttttcatgacgtatctcaaccgttggaatatcgactaaaatcaaagtataaccatcctgaagttcgatacgggagctctcctcctcatcgagtgcggcctggatatcttcgatatctacattcaatacttctgcgatctcggcacattcctgatgcgtcggctggagcatctgcacccatacgccgtccccgatcttttcctcttcctggatccgctgattatccgtcttaaaatatcttatcatggcattttcctcaatttcccgggatactgccatgtatcatgccaggtttttgcacattacattttccgggaatctttctattcaatttctctgtcataaataatctgatatgcgtttaagcccagtttcctgccaaacttaacgcctgcctgtctgatctgaccacagtaagaaaaaccaaagcgttcatgcagacggatactgacttcattttcactggtaatcagtgaaacaactgttccgatctgcgggcactctttggcatattgcaatgttttctccatgagactgcggccaatgccacgccctcgataacccgcatgaatataaatagagatctcaactgcagggtcaaaagcctttctttccctgtaacgtgaaagagaggcataacccgcgactgtgcctgcctcttcatatacaaagatcacatactggcctgtgtgtgcctgaaaccacgccagacgatcctcgtaatccttgatttccgtatcaaatgttgctgttgtatgtaaaatggcatcgttgtaaatgtccatcactgccggaatgtcttttaactctgctttacgaatcataataatccccatttttgcgcatctcaagtttgtgcgtaagcacaaatcttgcgtgtgaaaaatcttatttttcacactgatacctcaacattatttatcatagcacagatttttatacgacgccatgaaaagtttgtaaattccatgtaaatgagattttgggttatcatttatttttcatattcttcccacagcttccgcaaacgcttccagataaatatctgcctgctccctgatcttgtcctgttccttttcacttgccgcatcataaataccaaccgtcacaaacccggcttttttcgccgtcccgatcgcataaagtgcatcttcaaacaccagcgtgtgttccggttttgttccaaggaaatcagaagccgcatgataaatgtccggctccacttttcctttgccgatttccgtgcaggtaaatatccgttcaaaataagaaagcaggcctgtgcgctttaatgctgcctccaccatagggcggtctgtcgaggttgccacgaccatttttattccttctgcctgcagtttatccaaaaactccctcacgccctctttgggctgtacctctttttcatacgcagtataaacgatattatttacaccggtcacgatctcatccgtcgattccgtgaggtggtaattttctttcacgtattccgcacccttttgcatgctcatggaaaacaaaatctccgaaagtttttcccgcacctcaattcctttgttctgcagataccgctcgctggcgtgttcccagaccggcatggaatcaagcagtgttccgtccatatcaaaaattgcgccctgtatcagctctgttttcatattcatccctattcttgtatttgtagttttgtttttcttcaatgtcagactcatgcatctcaaaaatttatttaccattaatgccaggttcatgcattttgacttacctgcacacttcctcggacaacttcctcagttcctgtgcagctgccctgatatccttctgcgcaaagatagcgctgatcacagccacgccgtcaatccccgttctctttaactgtaaaatgttgtcccggctgatcccgccgatcgcaaccacggggatctgtactgctgcacagatttcttttaacacctcatgatctaacgttcccacatcttttttcgtgccgcttccaaacacagcaccagagccaaggtaagtcgccccgcatttttcagcgcgcagcgcttcctccaccgagtgtgccgaaactccgatgatcttatcctctccaagtctttttcgcacttcccctgcctccatatcatcctgtccgacatgcacaccgtccgcatcaatctccaatgcaagatccacgttgtcattaatgataaacggcaccttgtactccctgcacagtttttgtatctcttttgcctcctctaaaaatgcctgctccgaaagatttttctcgcgaagctgtaaaaaggacacaccgccctccaacgcctgtctgacctgctcatataatgtctgaccatttaaccagcttctgtctgttaccccatataataataactgttttctatcgaatctcataacgtgctcctctctctaacatatctccatccatacatgacactgcgtccatcaggctcacacggtaggttccgctgcccgactgtccgcttttctccgccgcaagctccccggcatatcccatcatgcagactgctgccgccgctgcctgtaacttattttccggattcgcagcaagaaatgcggttaaaataccggacagctgacatcctgccccggtcacatgccccatctgcggattaccatttcgaatcacataacaactgctgccatccgtgaccagatctatggctccggtgatggcaacgatcgtctgcagtttctttgacagcatttttgcattactaatatgctgtgctaaattttcctctgtcactgtatctgcattatctgcgtccacgcctcttccagaaccatctatacctgtaatttttccacaatgatctgatttatcagtaattttttccacatccattgtatctgacactgccatatttccactatttttttcctgtgttccacacaaagatgccaaggttttgatctctgaaatatttccccggatcgcatcaaaccgtacttcctttaaaagctgctccgccgtctgtttccggaaactgcttgcaccgactccaaccggatctaacaccacaacatgtccaagtttatttgccattttccccgctttttgcattgcagggattttcttttgatttagcgttccaagatttagatttaaccccatgcagtgtgccgtgatttcttctacctctgcctcctcatctgccatgatcggacttgccccgcatgccaaaaggacatttgcaacatcatttgctgtcacatagtttgttatattatggatcaacggtgccacgcaccgcacattttccagatactctttcataaattttctccattataaaattccacagtagatttcactgacaaaatttcctgccctgtgttaaccacttttacgcacattatacctcatttcccccttcccgcctatgcgactttatgaatttctcatctgtttttaagatttccttcattttccagtcaagaaatggtcacaattattccgtatcattaataacatcaaaaggagctgttgagtttcgactcggtggttggggttctgtcagttccgtcaaaaaacaatcctgccagattttccggcaggtttacatataaaaaggactttagaaaacatctcctccgttttctaaagtccttttccatataccggtccaatgagcattcactatattgcaggcacggatccatatcccattttatatacgatcagatacaggatcagcagatgcaccggataaaatgcgtaaaagaaatatttcattccaaagccacgttttccattgtaataaaagattggaacgaatgcaaacactgctgcccattcccaccatacaaatgccagacatccaaacacgacctgctgtattctgcttctccggaacaggtaaaataccatgatgcagagaactccgagtgcgccgtaatccgttgataaaaactctgccgcaaacattccggcaaggatcgcaatcgtagataatgccgtccgcttccagacactccagcggctctggttcatcaccgcatcatacgccatcatggtaagcagacccagcaataatgtaaaaaacacattctgatatccgacttccaaaacttttccgttgaatgccagatcaaacgggatctcagatactgccgcaaaacatcccagacgcagtgcatatttttcccggtctcttgtatgcataaatccttctaccagaagaaaacagaatatcggaaacgcaattcttccgatattccgcatcacacgatacagctgataaaggtcgtcattatagcctccgaattttaatatacgaatgatcacggttgccgcaatatgatcgatcagcattgttacgatcgcgattatttttaatgcgcttccactgagtccttttctttccatgaaatcccctatctgtctcaaatttctctcttaaccgaaaaaagagaaagacccgttcatctttctcttttcctgttttcatctggtactagcctacaaattcttctacacatctgcggtatgctgctaccggatcatctgcctgagtaatcggtcttccgactacgatatagtcagaaccaagttcttttgcctttgccggtgttgtcacacgtttctgatcgccaacatcgccgtctgcaaaacggacacccggtgtaatggtaaggaatttgtctccacatacctcgtgtacttttcctgcttcaagcggagaacatacaacgccgtctaatccggcttccatcgtattcttagcataatgcataacagtctggtcgatcggtttatcgatccacagttcctgctgcattacctcttcactggtggaagtaagctgtgtgactgcgatcagcagtggtcttgttccatcttctctcgtgagtccctcgatggctgcctgcatcatcgccttggtacctgccgcatgtacgttacacatatccacgtccagtcctgataatacggacattgcttttttaacggtatttggaatgtcatgtaattttaaatcaaggaaaatcttgtgtcccatctgtttgatcgtgcggacgatctccggtccctctgcataaaacagctccatgccgatttttacaaaaggtttttcctctttgaattttccaagaaaattgatcacttcttctttgctgttaaaatcacatgcaataataacgtctcttcccatatcttcctcctgctttaccctatccggtttattttcccattgtcaaatgcaatctatcgtcaagaattatacccgtatagcaggtgttttgcaagtcatttccatgacttaagcgagcttaaaacgattgatcgtctccatcaggtcttttgcgattgcctgcagcgtctcggtatgttcgctgatctcttccattgtaacatttacctgctcggtggaagcattgacttcctcggttgccgctgcggactgctcagataccgatgcgatcgttcccatcttatccacaacaagatctttgttggcagacatagtgtcattcagggcattgatacgttccataccggagcctaacatttcgatctgtttcataatctcgccaaagatctcttccgtgcggttgatcgcctcctgctgctcagtctgcagtacttcattttcctgcatcgtggactcaaccagttttgatttttccgtgatttccgtgatgatcttcttgatctcatccgttgactctttcgactcatccgccagtttacggatctcatctgcaacaactgcaaaaccttttcccatctctccggctcttgctgcctcaatacttgcatttaacgacaacaggttcgtctgggatgtgatgtctgcgatcgtatccgatatgtaaaaaatcttatcaatactctcaaccatctcattcataacctctaacgaaacttttgatttttcagctgtttttcctgatttttcaatcagatcttttacactctcaattccctcggtgctgacttcatttgccttttctgtcattccattcatgccggaaacatattcttttgtctcatctaagctgttctttaaatgctctacttccgtgttggcttcctgtgtactttccgcctgttttaccgcaccctgcgccacactgtcgattgcctgtgttacctgctcgatcgttgtttttgtatttccagcgacttctgagatgcctcctgcaacttcaagaatatggtttgatttatcctcgactgcatggatcagtccggacacatcatccatcataccgttaaagttcgtctcaagcacaccaaactcatcgcttctggtaactttgatcttctcggaaaaatcaccgcccgccacacgatgtgtcgcattctggagttttttgatctcgcggttaaaactgagcgctgtcaggactgcgatcacacatccaaagatcagaccgatcacaccggccatcaacgttcctatgttaatgttgatcaggttcttctggttttcctgatcactgatacagccgagcagtctccatccggtaatgcggtctgtcatcgccgtaatggcacagtcccttccctctgcacgcatggtataagatgcctgcaatacgatatcatccgctgccggatcttcattttcctccagctgtgctttctgttcttcgagtttatctaattcttctgttaacggagcaaaaaattcgaggtcagcaactgtaccatctgcaaaagtattactttcgctgtcaaccacgatatttccctgctcatctaccagcataacaaatcccgtatttaaaagtctgatattttccacatagtctgccagtgcagatgcatcaatatccatcgcaacaacgccctggacaacatctttatattttacttcctgacataccgtaatgatctgctccccggtttcttcatccacatacggcgcagtgatatagctgaaaatagaatttacttttgcttttcttccctgacatgcggtgtaccattctttcctggaaaggtctttattttccaccgtgttcatcgctgtctttgaaccgtcagcttcgtattgtacccatccggtgattgttctgccatcatttaaagcataataggcacgcaccgaaccatttacgactttacaggctgcaaccagttcgtcgtttacattgtcaatatatttatcatagttttccggctcaagcaaaagctgtttgatactgtcttttctcgtcaaaagatccaccggtatactgatcgttttctcatatgtctgcagacttgtcatcgcactgtttagtgtctgctcactcgtaagctgcatgttactgtttaacacgctctctactttactgtgtgtcagaagtgcacagatcaaaacacttccaagaatcgcagccataaacgctgcgatcagcttcgcactaagacttgtttttttcttcatttatgaaatcccccttcttttctcgttatgtaagcggttacattttttattataacatagatatgacaaatagggaatatattttaaacaaaaaaaaaccgccaacccatgatctctcaaggattgacggcttcccatctcatagtcggcgcgacaggatttgaacctgcgacctctgcgtcccgaacgcagcgctctaccaagctgagccacgcgccgtaatcaagttgtcttgaatcgtgcttgattatattatcacatctctacggaaatgtccatacctaattttatattttttcaaattttcctcttaaactcacttgcagagttaaattctacccttctatgaaatttaatcctgtaaaaacatgctgtttctttttacacattactattcatatcagtttatactaaataccatgatgggctacacttttattacattaagcagatccacccgttttctttatccaactatctgcagccgtcttatatgttatgggctattttttcagcgttcgtgtatttcgcccgttctcccacttcattgcttatgttttgggttatttttttccgcattcatatattttgcccattttttcatgtatcctcctcttttattttcaaaatgggtgaatttcttcatttaacatcaaaatagccctcgttttttcgttttcatggactattttaagtatttcgacctaattttcacccattttgattgaaaaatactataattcaataaaatttcggactattggtttctgatatatatacctttcgcccatttgaatacctatacattgttcatgtaaaataatattgaatcagtagttctacatactcataatctaaaggattctgcctggtttcaaaagttgtgagcaactgcatcgagggaataattcccaccgactgatacaactgtaactttgaatatacattatgagcataattttcattatccatcattccaaaatgttcccaataatacacttcacctgtaacaggatgacggatggtgaaatccggatatatactaacattttgaatctgtaataaacattcataacgaaatgggattttgtgttcgaataacgcatttatgattaaagcttcagattttgaccggaccagaattccgggaatggttttatgtatcaatttttgtggttctttcggattgtttgtgtaagaagcatttacccactcatccagttcttgctttaacggtacatagactcctgacaaaagtttctgcaactctggatgttcctctacatgatatgaagaaaattcatctaagctatattgcttcagataaatatctatccttttctcctcctgcttaaattttcgcagcctgctctctaaatattttcgttttaccagttgttccgcaagttttcgttcacttttgggaatgtattttgttttacccttatcggtataataccacttatagtacttattatttctcgtacagaaaaatgtacctgatggaagcacgtcaatctggctttgtaagtcattgatccgatcctccactttttgtttttccttcatcattcgttgatatagcacaaaataagtcctccaatactattatttttatgcaataattctaacacagtgctgtttccctgcaaatctacaattttaatttcatttagattttcattgaaattgtttcattgatttattcatgatataataagactgccgagcgaagcgagtgtagatcacgatcatgaagcattgcttcatgatataatgagcgcaagtgagtcaacatgcctgcatgattgacgaacggcaaatggcatcataaatgagtcaaaatactacgtattagaatgaacataaaaaaatatacaaatatagcgtaaacacaaactggaaatgttccagtaacggacaagaatggagatttttatgaatagaaccgtactagttaccggcgcctcccgtggaatcggacgcgcgattgcatccgcatttgccgcagagggcgaccggctgatcattacctgttccagatcagaacaggaacttttaaatttcaaaaaagaactggaagaaacttttcacacggaagtgctcgccagcgtgggcgatatttcttcctttgaatatgtcgaacaattatttgaacagatcacagaacgcttcggtggagtggatgtcctcatcaacaatgccggtatttcctatatcgggctgctgacggatatgtcgatcgatgactggaaccgcattgtctccacaaacctcacatccgtcttttccaccagccggctcgcaatcccacatatggtgcacgaaaagaaaggaaaaatcatcaatatctcttccgtctggggcattgccggtgcctcctgtgaagttgcttattccgcatgcaaaggcggcatcaattcctttacaaaagcacttgcaaaagaacttgcaccgagcaatatccaggtcaacgcgatcgcctgtggtgtcattgatacgcagatgaatgcctgtttttccgaagaagaacgcgcagaacttgcagatgagatcccggcaggaagatttggaacgccggaggagactgcccatctagcagtacagcttgccacaggaaatgaatacctgaccgggcagatcattacattagacggcgggtggctgtaacccgccgcatttttatgtctcacactattctgccactaaaataaccacacttctcggcggaactttcaatgtttttttataataaaactcggtctgtgcctccacatcttttccatcctcatactctatgtttgtattgacacagattttccactgcagattgttcggcagttccggaagctgcatcacaagtgtttcccagtatgcattcattccatagaaaatgatatcatccctggtatccgcgtcatccctgccggcatacatgataccgatcagtttactggtataatccgtacccccattccacgggaaaccattgtggatactgatctccggtaggccgcagagcgcttttttcgtggagcggcgcaaaatcggatatttttcgcgaaatgcgatcatataccggaagaaatcatggatctcctgatatttctccagtctggtccagtcaagccaggaaatgatattatcctggcagtaggcattattattgccaaactgtgtattacaaaattcatctcccgcataaaacatggcaggtcccctgctgcacattaaggttgcacatgcattttttaccattctaagacgcagtccttcgatctgcggatcatctgtctctccctctgctccacagttccagctgtttccgttgttatcaccatccgaattattccagccgtttttctcattgtgcttcgtattataggcatacagatcatacaatgtaaatccatcatgacaggtgacaaaattaacggatgcactgtctccgcggtgctccggataaagatcttttgaaccggtgatacgcgtgattgctgttcctgccataccatccgtaccttttaaaaactgacggatatcatcacggtatcttccattccattctgaccatcggttccatgacggaaaacttccaacctgatagagaccacccgcatcccatgcctccgcgatcagtttgacctttccaagaatggcatcacatgcaatcgcctgaagcaatggcggatctgccatcggtgtccctttttcatcgcgggttaaaatggatgccagatcaaaccggaaaccatcgacacgatactccgttacccagtatcgcagacagtcaatgataaaacgtcttactgccggatgattacagttcatgacattgccacagccactgaaattataatagtatccatccggtgtcaggatataataaatatcattatcaattcccttaaaagaaaaacatggaccatgttcatttccctctgccgtgtggttaaatacaacatccaggataacttcgattccattttcctttagctcgtagatcagttcttttaactcatcgccctcgtggttatgttccaccaccgaggtataactggtattgggcgcaaaaaaacagactgtattatagccccagtaattatacaggcgctctccgtctaccactctggtgctttccatctcatcaaactcaaaaatcggcatcagctcgactgcattcactcccagatccttcaaatacgggatcttctggcgcagtccctcataagtgccttctgcccccggtgtaacacccgatgatgcatcttttgtaaatcccctcacatgcatctcataaataacaagatcctcaaacggatgctccgtcggacggatatctccccagtcaaagttgttttccacaacccttgcgtgataaataaaatccgctccgccttccgggcgctctccccagttacgctgtcccgttactgccctcgcatacggatcaagcagaacattttctttcttaaataataatcccttcttctcatcataaggtccgtccaactggaacgcatattcaaactcttcgattttcaatccaaaaacgaacatggaatatgtgtttccaatatgataagcctccggatattttagggtcacatacggctctttttcctgcggccggaacaacagaagataacatgccgtcgcaccaaaggaatggatcgtaaagctgacacctcttgtggttgctgtcgcaccatctctgttataaaaacccggacgtacctgatatccattgatctcatccaatggctgcagcccaacgccgcgttcctgtttatgtctgcctgtactcatctgcaatcctccctgtttttcgaagcaaaatgcgactcaccactatatttcttataccccggatgttttccactcattttataataattgtttctaagatccacaagccggtcgatattttcccggtcaatttcttttgcacctccgagcagatgtgccgtcagtgttatttttgcaaactgctctaacgtttccatccggtaatatgccgtataaacatcggctccaactgttaccgctccatgattttttaacaggatcgcatcatgttcctgcagatacggggtaatggcatccggcacctcatctgtggaaggtgtcgcataaggcgcaatcggcactgaaccaagtgcgagcacagtctcgatcatggaatactcatcgagcggaatgtctgccacggcaaatcccgttgcaaccggaggatgtgcatgtaataccgccccgacatcttcgcgttcttcataacatctgaaatgcatccgcatttcggacgacgggcggtacccatccacagtttcgatcatctctcctgctttatttatatgcacgatcatttccggtgttaccatactttttgacacgccggtcggcgttgctaaaaatgtgccatcggaaagttttaccgacacatttccgtcattcgacgcaacccatccaagctgccacatcttatggcacacatcacagatctgtgctctgatttctttataactgagttccataatctcctcccaccgtacttttttcctattttactttccattataatcatcctctttcctaatttcaaccaggcaatatctgtgttatactatcctcagaaaatattaagaaacaaagaaaggcttttcccatgcaaaaaatacttcatgtttccgacaacccggaacatttttcctccatcggctctgcccttgcacaaattcctgctaataacacaacacctgttatcattgaaattgcaccgggcatttaccatgaaaaactaaccataaataaaccatatatcacacttcgcggaatgggcgaaagcagtgctcacaccgtcatcagctatgatgattatgccctggatctgatggaagatggcagtaagcgcggtacattccgcacttataccctctttatcgatacacatgatgtaacgctccagcatctcaccatcgaaaatgcctccggggattccgcaacacacggacaggcgatcgctctctatgccgacggggaccgtcttatgatcgattcctgccgccttctcggccatcaggacacactttttaccgggccgcttcccgaaaaagaacgacagcctggcggtttcatcggtccaaaacagtttgccccgcgtatcaatggcagacaatattataaaaactgctatatctgcggcgatattgattttatttttggaagcgccaccgcatattttgaacactgtaccttagaatccctgctgcgcacaaaaacatctgcacagtccgatttagtttccactacatccaccctgcatgattccggttctgatacatctgcactgtgtcattccaattcagatatggttcagaaaaattatacactccctcctatccagggttatgtaactgccgcctccacaccggaaggccaggaatacggctacattttttccgactgccggttcatctccaaagactgtcctgccggttccgtctatcttggcaggccatggcgcgactatgcaaaaacgatcctgatttcctgtgaacttggtgcgcatatccatcccgccggttttcatgactggaaccgcgaaaatacacatgacacagtatattatgccgaatacgcaagtttccctgctacctctgactaccgtccgctttctgaccgggctgattttgttcaaaatctgaatgaacaacaagccggatattttgcaaaagaactggttctcggtgactgggcacctgataaactgtaatttttagcagatattttttaatctgggtttgtatattcatgagaataatgatagaataatatacattaggaatatgagaaatccaaacaaagggggcatataagatggacgagaaaatttataagacaatgggttctgccggagcttccacactggcagttggtatctgtgtccttgcaggtggaatcaccgccgggattcttctgatcgtaaatggagccagactgttaaagaataaatccaaaattatgttttaaccaaatgtttccgcgaagctgttgcttttaaatatagaatacacgctccgcgaacattttattatcatgtactgaaaagcgcatatacagtaaaatcatctttccgacgatctgtttttactgtacatgcgctttttcatatgacaccatctgctttttacaagaaatttttactcaaattactcctcttcctgaacttctttctttttaaatacatctgcaagcaggaaaaatccaaagcacaatccatttaacaccagtgcaaccggaagatccttccagcttaccgtctgattttccagaacatctgcagaaaacgttcctgagatgatcggtatcaggttgttattcagatagtgcagacagaccggcacccagatattctgcgttttcatataggcatatgcaaaaaagattccaagtgaaatacatgtgatctgctgcgcaaaaatcatctggattcctgatgtctgtgtataataaaacagatcatccgggatatgccataatccccatacaacgccaagtatgatcacacctgcacgaagtccgaaccgtttctgcaaaaccggctgcaggtaatatctccagccatattcttctccaaaaaatgcaataaacacgaagaaataattgatcggaagtgcagcaatattcagccacatcattggatttttaaacattgccgcccattcttttacatactgcatcccactgccgtcagacacaccctgtaccgctacagacactacagttcttactatataaatgcccacaaacgcaagtacaatgagcacagcacttttccagttttgtctggtcagtcctgctgccgcacgcttttcatttccagctactgcaagaaaaacaagtgccacgatactcccgataataagtatatactgggaaatcagattataaacggacatcgtcatccctgcaatgttcaaatcatttaccggcagaaatacggataaaagtgccaatacgatcagaacacccgtcgttgccagaaccgtaataaaaaaacctgctggcaggattttctctcctttgtgtgccagaaaaagtccaatgatcacacctgctgccggatacatcatctgcgctgttggaaataccgtaaggtcataaccctttgtactgccataccacatcagaattcccatcagataggtcagaccgtaagccatcagcacataaataatcagtctcgtttttgccatttctttttgttccattttcaaactcctccccttacaatcatgaatgatacatgtttattagtccaattcgatcgaatccgatatataataatgaaacttattttttctgcaatactgtttaattcgtctgatcagttttttatctttcgtgtattctaaaagatagacttccattccatcttttttgcatttttgaacataatcggaaaagtatttgcgcacatcttctggctgttttccaaacgtacccgtttcaaactgaatactgctccacacagattcctgattgacggcagtcatgatatctttcgccgatccgtatgtttttctgtactttgtcacaaaaacatctccgccattgatcatgactccttttccaagacgtttgatatttttcagtattttggccagtcctttaaaatttttctttgtctttgcataatcgtagacatcgcagttgtcaataaagaaaccatccaccccctttttcagcagcttcttcgacagttttcccataaacttctgccagtccttattcgaaacatctacccacttttcttcttcccagttctcataagttccgatcgtaagatattcatatttcttataataatcgcgaaaattctcgatggaaccgacatttaagtaggtatatacttttacaccttttttgtgcagggtacggatatcttttgcagaaaaatactgtgcatcaatgaccaccagcctatatccgtataacttttttatctgagacgaatcaatgcttaaaaatacgccataatcctttttctctttttgattctttgcgtctatcgcacatggtcctgccagtatgccaagaaataaactgaacatccatgttaaaatcataatctttttccataaatatttcgattttttactcattcctgttctccccataactttcacctgcaaattttgcttttcgctgtaccggcagctgcgctaaaatgatcgccgaaaaaatcagacaacatcccagtatctcctttatactcagcttctgcccaagaatcagccagccaaataccgccgaaaatacggcttccaaactcatgattaaagaagccactgtaggattgagtccattctgtccaatgatctgtaacgtatatcccacaccacatgacataattcccgcatacaaaatcggaacccacgctgaccatgataaaaaggctgacgcccacgcttcgatacccgaaattgaatgctgcatatcaactgtaaacatcggaatcgcagtcagcaaaccggttaccagaaactgtatcatggaaagacgtaccccatcaaccttcggtgaaaaataatcgacaaataaaatctgtatggaaaaaccgagtgcacagcaaagaagcagcagatccgccggctgaaatccattcttatcctgcatacacagaaaatacagtcccaccagtgccagagcaactgcaaaccagatatttatcccacattttttatgtaaaaataatccgagaatcggcaccagtaatatatacaccgctgtcagaaaacctgcttttcccgcacttgcccccatcaaaattccaacctgctgtaagtttgtagaaatacaaagtgctacaccacaacagattccgccttttatcagcagtttataatcttctttcgtctgtggttttcttggcgacagatcttttttatctaaaaatttcatgacaggtatcaataccagtgccccgataatacaccggacacaattaaacgaatatgctccgattgtctgtccaccaactgtctgagccacaaatgcagccccccagacggctgccgttaccaataacaggatactgtttcttgttgttttattgttcatcttctgcctctttctaaatcaatcatattactgtaaatcctgcctattacctctttatttcctgcaggctcattagataatagtttaccattcttttggaataaatgcatcagcaaaaactgttttagataaaaaaaaccgcaacccctgattgctcaaggattgcggaatacaatctgcaatatataatttaaaattataaattactcgataactgtagcaacacgtccagatcctactgtacgtccaccctcacggatagcgaatgtaagaccctgctccatagctactgggtgaattaactcgatagtcatctcgatgttatcaccaggcatgcacatctctgtaccagctggtaagttacatacaccagttacgtctgttgttctgaagtagaactgtggacggtagttgttgaagaatggagtatgacgaccaccctcatcttttgttaatacgtaaacctgagctgtaaatttacgatggcatgtaactgtacctggtttagcaagaacctgaccacgaacaatctgatcacggttgataccacgaagtaatgcaccgatgttatcaccagcctgagcctcgtctaactgtttacggaacatctcgataccagttacaactgttgtctgaacgtcctctttaacaccaaggatctcaaggttatcatttaagtgtaatgtacctctctcaacacgtccggtagcaactgtaccacgacctgtgattgtgaatacgtcctcaactggcattaagaatggtttatctgtatcacgctgtggatctgggatgtactcatcaacagtatccattaactccatgatcttgtcgccccactcgccgtttggatcttcaagagcttttaaagcagaacctttgatgatcgggcatccttcgaagccgtactcttcaagctgctctgtaacttccatctctactaactcgattaactccggatcgtctaccatatcgcatttgtttaagaaaacaacgatgtaaggtacacctacctgacgggataataagatgtgctcttttgtctgagccataacaccgtcagtagcagctacaacgaggatagcaccatccatctgagcagcaccagtgatcatgttcttaacgtaatcggcatgacctgggcagtcaacgtgtgcgtaatgtctcttctctgtctcatactcgatgtgagcagtagaaattgtgataccacgttctctctcttctggagctttatcgatgttatcgaaatctgtagctgtgttaccagcaactcttgcagctaatactttagaaatagcagctgttaaagttgttttaccatggtcaacgtgtccaatggtaccaatattacaatgtggttttgttctttcaaacttagcttttgccatttttgaatatcctccttaaaatgatgccctatgggctatagttgttattttcaataactcggctaactctgattatataaaataatcaatcgtttttcaagctatttcttaccggatttcctatattttataggaaatccggatgttttagtcttattttgacttatctgctaaaactttttccacaggaaaaaatgatggtctattatttagatttgtctgctaataccttttcctgtacattctttggtactggctcatatttctcgaagaacatagagtagttaccacgtccctgtgtcttagaacgtaagtctgtagaatatccgaacatctcagcaagcggaacataagcttttacaagcttaccgccaccgatatcatccattccctcgatacgtccacgacgggagttgatatcaccgataacatcacccatgtattcctctggcatagttacttcaaccttcatgatcggctcaagtaataccggacttgccttctgcatagcttccttgaaagccatagatccggcaatgtggaatgccatctcggatgaatcgacttcatggtaagatccgtcgtatacgttagcatgtacaccaagtaccggaaatcctccaagaataccagcctgagctgcttcttcgataccttcacctactgccgggatgtattccttcggaatagcaccaccaactacgctagactcgaacttgaatgtctcttcgccgttcggatccatcggctcgaatttaactttacagtgtccgtactgtccacgtccaccagactgttttgcatatttgtactcaacatctacaggttttgtaaatgtctctttgtaagcaacctgaggtgcaccaacgtttgcctctaccttaaattcacgaaggagacggtcaacgatgatctccagatgaagctcacccataccagcgatgattgtctgacctgtttcctgatcagtatgcgcacggaatgtaggatcctcttctgcaagttttgcaagagcctcacccatcttaccctgtccagcctttgttttcggctcaatagcaagctcgataaccggctctgggaattccatggactctaagattacaggatgctgctcatcacagatggtatcacctgttgtggtgaacttaaatccaactgctgctgcgatatcaccagagtaaactctgtcgagctcctgtctcttattcgcatgcatctgaaggatacgtccaacacgctcttttttatcttttgttgcattgagaacgtaagaacctgctgccatgctaccggagtatacacggaagaatgcaagtttacctacgaatgggtcagccatgatcttgaatgctaaagctgagaacggctcatcatcagatgaatgtctctctacttcgtttccatccagatctacacccttgattgaagggatgtctgttggagccggcatgtactcgataattgcatcaagaagcttctgtacacccttgtttctgtaagcagaaccacagcaaacaggtacagctgtacattcacaggtagcttttctcaatacttttttcatttcctctacggatggttcttcaccctcaaggtacatcatcattaagtcatcatctaactcgcagattttctcgattaactcagaacggtaaagctctgcatcatctttcatatcacctaaatcatcggtaacagtgatattatcacccttatcgtcgttgtagatgtatgctttcatctcgaataaatcaatgacacctttgaaatcatcctctttaccaatcggtaactgaagaacgattgcattttttcctaatcttgtacggatctgatcaacagcaccgtagaagtttgcacctaagatatccatcttattgatgaatgccatacgcggtacattgtaggtatcagcctgacgccatacgttctcggactgaggctcaacaccaccctttgcacagaagacgccgacagcgccgtcaagtacacggagtgaacgctctacctctactgtaaagtcaacgtgaccaggggtatcaatgatattgatacgatgctctaaagcacctgcctttggttttgtgaactcttccaatgtccagtgacatgttgtagcggctgatgtaatcgtgatacctctttcctgctcctgctccatccagtccatggtagcagtaccttcatgagtatcaccaatcttatagttaacaccggtatagtaaagaatacgctctgttaatgttgttttaccagcatcaatgtgagccataataccaatgtttctggttctctctaatggatattctcttccagccaaggtatttcctccttaatttactaacgatatgctatcgccgcgaaagcaaaagctcacgcagcgatcaaaaattccatatttaaaagcaacagctttgcggaaacattttggattctattagaatctgtaatgcacgaaagctgaagcatcgcggagatattctgaattcttttagaatctgtagtgcgcgaaagccttgtttgcctctgccattttgtgcatatcttcttttttcttaacagatgcaccagtattgtttgctgcatccataatctcgttcgcaagtctttcttccatcgtcttctctcctctgttacgagagtaagtggtcagccagcgaagtgctaacgcctgacgacgatccggtcttacttcgatcggtacctgatatgttgcaccaccgatacgtcttgcctttacttcaagaacaggcataacgttattcattgctgcttcaaatacctcaagagctggtttctctgttttctcctcaactcttgtgaaagctccgtatacaattttctgagcaacacctttcttaccatctaacatgatgttgttgataagtttggtaaccactttgttgttgtataacggatctgctaatacgtctcttttctgagtatgtcctttacgtggcacggttcttccctccttaatcataatttactatacagaaaaaacttctgcatttactgagtgcggcagcgccgccatttacagccttataacctgacagcataccgctatccggcaggctgtttcagtgaacttcatttcgattaattcaacggtactcacaatgtgtaaaatatcggtcaaagaccacctatttcgccataatgttcgtgcggaaatctatcgtttgtgataataatcccaacaccaacctatagtccatccggcagaagatgccggatacaacaaatgtgatactatggttcgctaaattatcaagcaacttcggtccaatacctaaaattacttagaagcctttggtctcttagcgccgtatttggaacgagcctgctttctgttagcgactcctgctgtatcaagtgtaccacggatgatgtgatatcttgtacctggtaagtccttaacacgaccaccacggatcagaacaacgctgtgctcctgtaagttgtgtccctcacctggaatgtagcttgttacctcgattccgttggaaagacgaactctggcgatctttctaagagctgagttaggttttttaggagttgctgtcttaacagcggtacatacacctctcttctgcggagaagaagtatttgtaggtctcttctgcagggagttgtaacccttctgaagtgcaggtgcagtagacttcttaacagatgtctgacgtccttttcttactaactggttaaatgttggcattattttcacctcctgttatattaaatatgcatccctaaatatgcatgctaaattattatataagtgcaattcctgtatgtcaagccttttttctattttcagactttcttctataataatctgttttttttgcacccttatctattttttccagtttcttgtgaattatacatattttttccagctgccagaaaaaagaatcctatgaatcaaaaaaagaaccgtgcaccactgacttttatcagctggtgcgacagttcttctcataaatattattttattcttcctctaccggagcttcttcgatttcattttcttcgtccctcggaatctcttcctcataatcgtcgaagtcatcaaaatcatcaaacatcagctcgtcatcctcattgatatcagaatccagtttaatgttgcggtatctcttcatacctgttcctgcaggaatcagtttaccgatgataacattctctttcataccgatcaatggatcgactttacctttgattgcagcttccgtaagaacttttgttgtctcctggaaggatgctgctgataagaaggagttcgttgcaagggaagccttggtaataccaagtaatacctgtttgccctctgccggctcttttccttcttctaccagtttctcattggtatcttcgaaatcaagtgcatctaccaatacacccggaagcatctctgaatcaccgtttgtctcaacgcgtactttctgtaacatctgacgcacaataacctcgatatgcttatcgttgatttctacaccctgcagacggtatacacgctgtacctcgcggagcatgtaatcctgaactgcacggacacctttgatctttaagatatcgtgtggatttacagaaccttctgtcagctcatcaccggcttcaagtactgcgccatccataaccttaattctggaaccataagggatcagatatgcctttgattctccggtctcattattggtaacgatgatctcacgtttcttcttggtatccttaatcgttgctacgccgccaaactctgtgatgatagcaagacccttaggctttcttgcctcaaaaatctcctcgacacgaggaagaccctgtgtaatatcgtttccggcaacaccaccggtatggaacgtacgcatggtaagctgtgtaccaggctcaccgatagactgtgctgcgataataccgattgcctcaccaacctgtacagcctggccggtagccatgtttgcaccgtaacattttgcacagacacccatatgggagcggcaggataatacggtacggatcttaactttcttaagcggctcgccattctcatcaacaccctggctcataactgcagctgcacgcttcggtgtgatcatatggtttgcttttacaatgacatttccatctttgtcacagatcgtattgcaggagaaacgtcctgtgatacgctcctgaagactctcgatctcttcttttccatccatgaatgcagttacccacattcccggaatctctctgcctgtaccctcacagcagtcagactcacgaacgatcatgtgctgtgaaacatcaacaagacgtctggtcaggtaaccggagtcagccgtacgaagtgcggtatcggaaagacctttacgggcaccatgtgcggacatgaagtattcgagtacgtcaagaccttcacggaagtttgacttgatcggcagctcgatcgtacgaccggttgtatctgccataagtccacgcataccggcaagctgtttgatctgtttatcggaaccacgggctccggagtcagccatcatgaagatgttgttgtatttatcaagtccggaaagaagtgcatgtgtcagttcctcatcggtctctttccaggtttcaacaacctctttgtaacgctcttcctcagtgataagaccacgtttatactgtttcatgatacggtcaacagtatcctgtgcatctttgatcatctgcggtttctgaggcggtacggtcatatcggaaatggatacggtcatagctgctcttgtggaatatttgtaacccatagcttttacggcatcaagaacttctgctgtctttgttgcaccatggatattgattactttttccagaatctgtttattctgtttctttgcaacgaggaaatctacttccagttttaattcattgcccggaatgcttctgtctacaaatccaagatcctgtggaatgatctcattaaaaatgaagcgtcccagtgtagattctacatttccggtaagtgttgttccatccggcatggtctttgtcatgcggacggtgattcttgagtgaagtgttactacaccattctcgtatgcaagaattgcttcgtttacactcttgaagaatttaccttctccttttgctcccggtctctcctgtgtcagatagtagataccaagtaccatatcctgtgaaggaacggcaacaagaccaccatcagatggttttaacaggttattcggtgaaagtaacataaaacggcactctgcctgtgcttctacagaaagtggaagatgcacagccatctggtcaccatcgaagtcggcgttgaacgcggtacataccaatggatgtaacttaattgccttaccttctacgaggatcggctcgaatgcctgaataccaagacgatgcagtgtaggagcacggtttaacataaccggatgctctttgataacgtcttcgagaacatcccaaacctctgtctggagtctctcaaccatctttttcgcactcttgatattgtgtgcagttccgtttgcaacaagctctttcattacgaacggtttgaacagctcaattgccatctcttttggcagaccgcactgataaatctttaacttcggctctacacagataacggaacgtccggagtagtcaacacgttttccaagtaagttctgacggaaacgtccggatttaccttttaacatatctgaaagagattttaatgcacggttaccaggacctgtaacaggacggccacgacgaccattatcgatcagggcatcaacagcttcctgaagcatacgtttctcgttgcggacgatgatatccggtgctcctaactctaagagtcttcttaaacgattgttacggttgatgatacgtctgtataaatcattcagatcggatgttgcaaaacgtccaccatccagctgaaccataggacgtaaatctggcgggataaccgggatcactgtcatgatcatccactccggtttgttgccggactcacggaaagcctctacaacttccagtctcttgatgattcttgcacgtttctggccggttgcatcctcaagctctgcctttaattctgcggaatctttctccagatcgatcgcctgtaataattcctgaatagcctcagcacccattccaacacggaaagaactgccgtactgctctctcgcttcctggtattcgctctcggaaagtacctgtttgtactgcaatgcggtgttgcccgcatccagtacgatataagaagcaaagtaaagaactttttcaagagttcttggggataagtcaaggattaatcccatacgtgacggaatacccttaaagtaccagatatgggataccggagcagcaagctcaatgtgtcccatacgctctctacgaacgcttgcttttgtaatctcaacgccgcatcggtcgcagacaacgcctttgtaacggattttcttatatttaccacaatgacattcccagtctttgctcggtccaaatatcttttcacagaacagaccatctttttccggttttaaagttctatagttaatggtctccggtttctttacctcgcctctggaccattcccggatcttttccggagacgccaatccaattttaatggcatcaaatgagatagactgacctgtggtttctttactcattgtttctggcattatgacactccctttctatttattcttcgtcaagagtattttcttctgcatcgtcgaaaaagtcggaatcatcctcatcttcctccggttcctcatccacatctacgagttcttcattttccgcattgaactctttctgtgagaatcccatctttgcaaaggaatcactgtcctcaaatgcaaaatccttatctccggaaataatggaattcaaatctgtattgccgtattcgcttgtctccatcagctctacttcgtttctgtcctcatctaagactttgacatccagaccaagtgactgaagctcttttaacagaaccttgaaagactctgggatacccggttcagggatattatcacccttaataattgcttcgtaagtcttaacacgtccgacaacatcatcggattttactgttaagatctcctgtaaggtataggatgcaccgtatgcttccagtgcccaaacctccatctctccgaaacgctgaccaccgaactgtgctttaccacctaacggctgctgcgttactaaggagtaaggaccagtagaacgtgcatggatcttatcatctaccagatggtggagtttcagataatgcatgtgtccaatggtaaccggtgaatcaaacggctctccggtacgtccgtcacgaagctgaacctttccgtcgcgggagatcggaacgcctttccacagtgcacggtgtgcacgattgtcagaaagatacttcataacgtcttctcttaatatatctttatatttttcttcaaagctctctgttttgccttctttttctgcttctgcagcatcaaacggcatatttacatagtcatttgcaagctcaagtgtatcctggatatcaatctctttcgcgccatcgaataccggtgtctcgatattaaatccaagtgcttttgcagcaagacttaagtgaatctcaaggacctgaccaatgttcatacgggacggcacaccaagaggatttaatacgatatcaagcggacgtccgtttggcaggaatggcatatcctcaacaggaagtacacgggaaacgacacccttgttaccatgacgaccagccatcttatcaccgacagagatcttcctcttctgtgcaatataaatgcggactgcctgatttacaccaggagataactcatcaccgttttctcttgtaaatacctttgcatcaactacgataccatattcaccatgtggtacctttaaggaagtatcacgtacttctctcgctttctcaccgaaaatcgcacgaagcagtctctcctcagcagtcagctctgtctctcccttcggagtaacttttccgactaagatatcaccggcacgaacctctgcaccgatacggatgatacctctctcgtcaagatcttttaacgcatcatcaccgacaccaggaacatctcttgtgatttcttccggtccgagttttgtatcacgtgcttctgcttcatattcctcgatatggatggatgtgtaaacatcatcctgtaccagtctctcacttaagagaacggcatcctcgtagttgtaaccttcccaggtcatgaatccgatcaacgggttctttccaagtgctaactcaccatttgatgtagacggaccgtctgcaattacttctccggcttccacacggtcacctttgaatacaatcggtctctggttgtaacagttagactggttacttcttgagaacttcgtcagtttatatacatctctggttccttcatcactcttaatgatgatctggtttgattcagagctttctacgataccagatttctttgcgatcacacatacaccggagtcaacggctgcctttgtctccatacctgttccgactaccggagcatctgtggtaagaagcggcactgcctgacgctgcatgttagatcccatcagtgcacggtttgcatcatcgttctgtaagaacgggataagtgctgttgcgacagagaataccatcttaggagatacgtccatgtaatcaaacatggttttctcatactcctgtgtctcctctctgtaacgaccggatacggaattacgtacaaaatgtccttctgcatccagagcctcattcgcctgcgctacgtgatagttatcctcttcatctgctgtcatataaactacttcatctgtgacacgcggattcttaggatctgatttatcaattttacggtacggtgcctctacgaaaccatactcgttgattcttgcataacttgccagtgagttgataagaccgatgtttggtccctcaggtgtctcgatcgggcacattcttccgtagtgggaatagtgaacatctcgtacctcgaatccggcacggtctctggaaagaccacccggtcctaatgcggagagacgtctcttatgtgtcagctcacctaacgggttgttctgatccatgaactgtgacagctgggaagatccgaagaactcttttaccgctgctgttaccggcttaatgttgatcagactctgtggagaaataccatctaaatctaaagtagtcattctctcacgtaccactctctctaatcttgaaagaccgatacgatactggttctgtaataactcaccaactgcacggatacgtctgtttccaagatgatcgatatcgtcatcatttccgataccatactctaagtgcatattgtagttgatggatgcaaaaatatcatctttagtaatatgtttcggaatcaggtcatgcacattctttttgatagcttcttttaagtcatcaatatcggtatgctcttccattaactgggcaagtaccggataatatactaactcagtgataccaagatcttttggattgcagtctacatatgctcttaaatcaaccatcatagatgaaaggactttgacatttcttgtctctgtctggatccatacatatggaacagctgcattctggatatcatccgcaagacttcttgttacctccgtacctgcttctgcaatgatctcacctgttgcaagatttacaacatcctctgcgagaacatgtccgttgatacggttctttaacataagtttcttattaaatttgtaacggcctacttttgcaaggtcatatcttctcggatcaaagaacatagcagaaataaggctctccgcactttcaacagtaagcggctcgcctggtctgattttcttatataactcaagaagaccttcttcataattcgttgcaacgtcttttccaaaacttgcaaggatcttcggttcctcgccgaacagatcgacgatttcctgattggtaccgataccaagtgcacggatcaatactgtaatcggcacttttctcgttctatcaacacgaacatagaatacgtcattggagtctgtctcatactctaaccatgcaccacggtttggaatcacggtacaggaatacagctttttacccactttatcgtgagcaatgccgtaatagatacccggagaacgtaccaactggctgacaataacacgctcggctccgttgatcacgaaagtacctgtctcggtcatcaaaggaagatcacccatgaaaatctcatgttcattaatctcatctgtttctttgttgtgaagtcttacctttacctttaaaggtgctgcgtaagttgcatctctctctttgcactccggaattgtatattttacatctgattcacataatgtaaaatcaacaaattccagactcaagtgaccgctgtaatctgcgatcggggagatatcgtcgaaaacttcttttaagccttcttttaaaaaccactgataggagtctttctggacctctatcagattcggcatttccaatacctctttctgtcttgagtaactcatacgcatgcctttaccggctttgactggtcgtattctgtttttctccatttgacgtttcacctctcgtttttattaacataagggcagaacccgttgtttataacgttaccggactcctgcgaataagcgcactaagtccactgcaccacaatagtgcaacgtatatgatagcacaagagaggagcatacgtcaagaactttttttaattatctaaaaaaagagacatgatattatcatgtctctttgcatacgtgcgcgagaagattcgaactcccgacaccttggtccgtagccaagtgctctatccagctgagctacgcacacatattcaattcattgtatctgaaaccagatacaatgccggcgaccggaatcgaaccggtactgtatttctacaacaggattttaagtcctgcgcgtctgccagttccgccacgccggcataatgagataaactcatcaaatgggacctatagggctcgaacctatgaccctctgcttgtaaggcagatgctctcccagctgagctaagatcccacgcgattacttgtagtgagtgttatactttcttcactacgaacgacccaagcgggactcgaacccgcgacctccgccgtgacagggcggcgctctaaccaactgagccattaggccgtattaaatgactccgacgggaatcgaacccgtgttaccgccgtgaaagggcgatgtcttaaccgcttgaccacggagccttatctttattctttcattaaaaaaactccccgagtaggactcgaacctacgacagcgcggttaacagccgcgtgctctaccaactgagctatcgaggaataatctaaaggtatttctgataccttcaaaacttcatacagaactccgtcaaccaactgtgaagttgcaaagcaacttccaatgcgaacatcgttcgctatttggtcaagccctcgatcgattagtaacagtcagctccacacgttaccgtgcttccacctctgccctatctaccttgtactcttcaagggatcttacttccttatggaagggatatctcatcttgaggggggcttcacgcttagatgccttcagcgtttatcccttccggacttggctactctgccatgccgttggtcgacagcagatacaccagtggtccgtccatcccggtcctctcgtactaaggacagctcctctcaaatatcctccgcccgcgccggatagggaccgaactgtctcacgacgttctgaacccagctcgcgtaccgctttaatgggcgaacagcccaacccttgggacctgctacagccccaggatgcgatgagccgacatcgaggtgccaaaccactccgtcgatgtgaactcttgggagtgataagcctgttatccccagggtagcttttatccgttgagcgatggcaatcccactttatgccaccggatcactaagtcctactttcgtacctgctccacccgtcggtgtcgcagtcaagctcccttctgcctttgcactctt

SEQ ID NO: 5303 - DNA, 311 bp, Unknown
  gut microbiota DNA sequence
gcgtttaacccatatttaccgtcctgggagtatattccggacggagaaccttatgtttttggcgatcgcgtatatgtttacggatcccatgattactttaacggatatgttttctgcatgggagactatgtgtgctggtcagctccggtcgatgacctgggcaactggagatatgagggtgtgatttatccgaagacagccgatccgctgaacccggaaggcaaaatgtgtctgtatgccccggatgttacggtgggaccggacggaaggtactatctttattacgtgttggacaaggtttcggtagtttc

SEQ ID NO: 5304 - DNA, 254 bp, Unknown
  gut microbiota DNA sequence
ttcgggtgtcaaaaggtggttttcaattttgggtctgtcaaattgcacaaaaccgaacttgttttgttccgttgtccgaaaataagaaaaactaagtatgcctgaatcagtttttcacagagtgacgtaaacggcattcaacgagccttccatggctcgtgaagccttgttctgccgtccgtggcagaacattactgtaaatagacaggcatactaagattttctaattttctcccaaagtcacaaaaacagtc

SEQ ID NO: 5305 - DNA, 540 bp, Unknown
  gut microbiota DNA sequence
ggcaagtggtatatatgatagatatatcatgttctttaattatttttcgtcccatcctcacggcacttctttcccagaatctaaagcggtcgggaacttgaatccatcggtctagtatatatttataaaacttaccgaataaagattgcttgttagaggtgactgtatccgtgctttttgactgtgcaccaatagtttttgctttggctgtaatggctttgagtgaagtatcttctcctccaagcaacattctaaggccgcgcaatgtcggttctatataattggcttgataaataggcacgtcttggacttcgtccaacaaatcaggatcttctaaatatagataattacgattaaccgtcagtactatcggattccaacctgtacgtttaagatattttacaagtttaaatgccctaaataccgcagcatgagtctgtggcggaaaaaaaggagtaattataagtatgtttttattcatcgttttaatttgtttaaaatcaatgcttttacttttttcttattttctttgtctaatag

SEQ ID NO: 5306 - DNA, 74270 bp, Unknown
  gut microbiota DNA sequence
gaacatcccaaaaagaactccagacagtcaaaaagccatattctgacgttaatcagaatacagcttcttgagttgaactgtttacattataaactagttcatggatacaaatatagtttagcacacttttcaaaaatctacaatagtaaatttcataaaatttaaaattttttcaaaaaaggattttcacctctattttcattccacacaatcttctctgtaaattcacgcaacttccaacccggcttcatctaaccgtcacattcccccgatagaatacagctatcaacaaaaaaggagtgacaaacattatgaaatatcaaaaagcattattatgtatcgcattggcaggaacactgattttttccggatgcggcagcacaaacaatagtacaggtaataacacaaatacctcttcttctgtagaaagcacagtggaaacatctacggaggacactgatgcaaaatcagatgaaaacacggtaaccggaatgatttccgaaattaccgacagcacgatcacagttgcagccatgccgggcggcgatcagggcgaaacaccgggcaatccaccgagcgataacaaaggtggtgccccagcagacaacgggcactctgacaacagcgattcaacagaggcacctgacaaacctgactctgatggcgcagattccaccgaaacccctggcaatccgcctagtggagacaacaattctgccccttccgacaacggcggtgccccggatatgagtaatatgacaactgagacgatcaatctgaccgactctaccatctattatgacaaaaatggaaaagaaacaacactttccgctttatcagaaggtactatggtaacgatcaccttagatgatgatggtaacgctgcaactgtaacgatctctgacaacgccggcggtcagccgggaggtaacactccaggcggaggcgctccgggaggcagcacttcctcccagccggaatcttacaatgccgtaaccgaatatacggaagataccgaagtttccgatgagactttctcttccaccggatccgatgaaaatgcggttcttgtttcaaatggcgcaaacgttactttaaaagatatcacattagaccgcacttcctccgacagtaccgatggcgattcgtccagtttttacggagatcatctgggacagcatcagccagcttgacgtttcccttgaaaataaaagtacctggaccggaagttttgttcaggatgaaagcaatgccggaaatggcggagacggttatgcaaatctgaccattgacagcagttctacctggatcgttgatggggacagcactctctcctctttaacctgcaagggaaccattacagatgaggatggcaacaccgttaccgtcaaaggctctgatggaaccacttatgtggaaggtacaagcgattatacaattaccgtaagttcttatgaagcataattaattttatgacttacaaataatttattcgtatacctatgctttcataaatgatagcttatggacgaagaatgacagaaataaaaagagccagacagatcatctttattttaggatgtgacctatctggctctcttcgattttttgcatttatcctgtcatcaaaagcatacttcatctcttatacttttatgcttcacgaaacacctgataaatatctatttttattgcatctgtatccgacattccaataaaagttgctccatatttgtcggttccatcttccattttctgcttacgcacgatctcgatgactgcatcgatcacctctttcgtccatatctggattctggtattataatattcccccacttccaaaggttcgtcggactggaagccgattccgccgcgcgaaacatccgtaactacaacctgcgtgtaatcatatgtcgtcgttccatcttctgtcagacgttctaactggatggaaacgtcgagttttaaacgcttatgatgtcttttctcttccattccgtaattttccttctctttcgtgattttttcaagcaatcattttgcccgtaaatcatgctgtctgttgcatcttttcagatcatttaaactgttgtatccgttatcagcattgcatccccaaagctaaagaaacgatatttctcctgcacggcaatttcatatgcgtttaacacatgttcccgtcctgccagtgctgaaactaacattaccagtgtggattccggcaaatggaaattggtaatcagggaatcaatgactttaaacctgtaacccggataaataaagatctctgtccatccgcttgtctcgcgcaggaaaccgttctcgtccgatgccgcctctaaagtacgcgtgctggtcgttcctaccgcaatgacacgatgtccggtctcttttgcatggttgatcttatctgcctcggactgttcgatccggtaaaattccgaatgcatatggtgttttaatacatccgtctccttgaccgggcggaatgtaccaagccctacatgaagtgtcacctctgcgatctccacacccatttcctttactttttttaataattccggtgtaaaatggagtcccgctgtcggtgcagcggcagagccatcatactttgcatataccgtctggtaacggtttttatcctgaagctgatgtgtgatataaggcggcagcggcatctgtccaagctggtctaaaatctcctcaaaaattccatcatagtggaactggatcagacggttcccttcttccacgatatcaatgacctcaccggtcagaagtccatcgccaaaactgatctttgttccgactttacattttttgcccggttttacaagggtttcccagatatcattttccttacgtttcaacagaaggatctcgatctttgcctctgtgccctctttcactccgtacagtcttgcaggaattactttcgtattgttaatgacaaggcagtctcccggtcttaaataatctgtaatatccttaaaaacacgatgtgtcacttcaccggtatttttatctaataccatcagtcgtgaactggaacgatccttcaacggatcctgcgcgatcagctcctgcggcagatcataataaaaatcttttacatccatgataatcctcattcaatatactacaaatacctgatccggcagaaaaccggatcaggcactacttacatgcatatgctttttgttttattttcttaattcagcaccgacacgctcaagtgcatttacaatcctatccattgcaccagtgatatcggcatcctctaagtttctgtcctttgcacggaaagacaaggagtatgcgattgatttatatcccggtttgatctgtgctccctcatagatatcaaacagatcatatttctctaagaactggccgcctttttcatcaaaaatcttctcaatatcaccggcaagcactttcttcggaacaaccatggaaatgtctctggctgcagccgggaatttagcgattccctcatatttgtggtcgaaagatgcgcgggatacgatctctggcatatcaagtactgcaacataaacgcgctctttgattgcataatttgcagcaaccgtcggatgaacctcaccgagataaccgatcacagtgccatcataaacaacatttgcctgacgtcccggatgtaagaatggttttccggcttccggatcatattccggtttcagcttcattcctgctttgtaaaggaactcctcgatcacacccttcatggtaaagaagtcaccctctccgtacataccaagtgtaaactgcatgcgctcttccggcagctctgttaccggtacctgttttggcaggtaaatatttccaagttcatacagacgcacgtttttatttctgcggttaaagtttgtggaaagtgatgtcagcataccatttaaggaaatcgttctcatgatagagaaatcctctccgagcggattgctgatcacaaccgctttgcggagcggtgaatcctgtggcagtaataatttatcgtatactttcgggctctcaaaggaatacgtcatcccctgtgaaaatccgcagaactctgcgatctctcttgctactgcctcgatgcggagtttgaaggtaagttttccggtggtagcctcaccgcttggcagtgtggtcggaatcttatcataaccgaagaatcttgccacttcctctgcaaggtcggcgtcacactctaagtcctgtctccaggatggaacgatcacttcgttcgaagccggatcatagccgaggttgatctttgagaaataagccagcattgtctcttttgcaatgtccgttccaagtagtttgttgtatttctccggctcgaatggaatacgtttatcccctttggcattcgggtaaacatccacaacgccgccgacaacttctccggcaccaagttcctctataagctggcatgcacggttcattgcctcgatcgctgtgtttggatctaagcctttttcaaattttgcggaagcatctgtacgcagaccaatctttcttcctgacagacggatatttgttccatcgaagcatgcagcttcaaacagcattgttttaacattgtccgtgatcatggagttttctccacccatgatacctgcaataccgatggcttttcttccatcacagatcattaatacagagtcatctaaggtgcgttcctgaccgtctaaagtcacaaactgctcaccctttgcagcgcgtcttactacgatctctctgtcctcgatcgtgtcaaggtcataggcatgcatcggctgtccatactcttccatcacatagtttgtgatatctacaatgttattgatcgggcggattccctgcgcacgcagtctgcactgcatccattccggcgacggtgcgatcctgatattttttaccactcttgcggtgtaacgggaacagagcttatcatcttttacagatactttgatgtaatcgttaacatcttcattattacctgtttctgtcacaaccggaggaacaaactcttttccgaacgtagctgccgcctctctcgcaatacctaaaatagagaaacagtctactcggtttgaagtgatctcatattccacaaccgtgtcatctaatccaagataactgatagcgctctctccgaccggagcatcttccggcaggatatataaaccgttttccggtgcaagtgggaacatatctctgtttgaaccaagttcctcgatggagcacatcataccgtttgactccacaccgcgcagttttccttttttgatcttaataccgccctcggtcttgctgccgtcatgacctccggcaacttttccaccgtctaatacaaccggtactttgcacccttcagtcacattcggagcacctgtcacaatctgtattgtctccgttccgatatctacctggcagatcacaagtttgtccgcatccggatgtttctcaatgctttttacctgtccgatcacaattttatcaagatcctcatccatgttctcatatccttctaccttagagccggataatgtcatggcatccatatattcctgtggtgtacagtcaagacctggaactaagtctttgatccactttaatgaagtattcataatgctatattctcctatctttttcctagaactgatttaaaaatctctgatcattttcatagagcagacgcatatcatcgatctcatatttgagcagtgcaatacgctctaatccgataccgaacgcaaatcctgagtattcttccggatcaatgccgctcatgcgcagtacacgcggatgtaccataccacagcctaaaatctcaatccatccttcacccttacagaaacggcatcctttcccgccgcatttaaaacaggtcacgtccatctcggcagatggctctgtaaacggaaaatgatgcggtcggaattttactttggtatcctgtccgaataactgtcttgcgaattctgcaagtgttccctttaaatcagaaaacgtaatgtttttatcaacgacaagtccctcgatctgatggaaagacggagaatgtgtcgcatctacctcatcggcacggaatacacggcccggtgcgatcatacggatcgggagatgccctttttccatctcacggacctgtaccggagatgtctgtgtacggagcacgatcttgtcattgatatagaacgtatcctgctcgtcctttgccggatggtttgccgggatattaagagcctcaaagttataataatcatactctacttccggtccctctaccacttcgtaacccattccggtaaagatgcgctctacctcttctaaagcgatcgtgttcggatgacggtgtccgacattatttttctttgccggaagcgtcacatcgatgacttctctgcgcagttttgcatctaactccgctgcctctaattttttctttgtctcatctaaaatcttctcgatgctctctctcgtctcattgacaagctgtccgactaacgggcgctcctccgggctgacatccttcatgctctttaatacagcggtcagttctcctttttttccaagaactgcaacacgcacatcattcaatttcgacagatcgccggatgcttcgatctgacggatcgcatcttctctgattttctgcaatttttctttcatgataatctccattctgcattatttctttcagatatttgtctcacaaattatttttgtgacacaatttcctgtggtggatttgtttcagcaacaaaaaacgcggagtcattcgtccagggacgaatgattccgcgataccaccctgattctttctgccacgaatattgacaaaaagctcttaacatgcgtaacgtgcatggacgtcatctgctactgtcatttcacaaatgcagctcccgtgcgaacttcgctccctaccttgtcttaaatgggttttcagccggtgacccactctctctgaaagaattatagtgcactactaatcacgttcaatgccttttcttttattttcactctgtattgcattttagcacaggaaatttattagttcaagagttttttctctttttcttctctttctctttgagcagccacttgcggatactgtcattgaaaatgacatttacttccgccgacatcatcatgatatacatacagaaataaagccacagcatgatgagggcgatcgtcgtcaggcttccatacatggaaaaaccgttaaaataatccacatagatggaaacaccgatagaaaaaatataccatgccacaccgcagatcgccgcgcccggaagctggcttttaaaggtcagttttttatttggcagtgctgtaaatatcacatcaaagaaaacaattaacatgaccagcatgataagtccccgaaaatgtgccaaaagatctaccgcatgccgcagtaacgggatatactgcgatgccagtttttggagagaattaccaaaaacaatgactaacagtgtaaacacaatagctaccagaaaaatcaccgtatacacaactgcccacatccgcagtacaagccaatttcttgtttcctccagatcattgaccgaattgagtccatccgtcatgtactgcacaccttttgctgctgaccagattgcaacgatcgccgtaatggaaataatgcctgctgatctgttgtatacctcatcaatcagtgaaataagaaatggtgctatgtattccggcataactctctcgatgatttttaaaagcgtcccctctgtcacggaagtatactgtaacagggatgagaaaaccataagaaacgggatcagtgataatataataaaaaacgcagactgcgcagaatatgcattgatcttatcccgtttacattttcccataaacgacatcacatttcctataatcttccagatcataatgtctcttttccttccatctctccgattgtttccacggtaatatcctgataaaaataatttaagatatcctgatagcccataccggcttttgccattccgtttgccccattctggctcattccgagtccgtgcccataaccaccgccggacagcagatatgtcccgtcttcctgtttctcgacggttgaaaatgcacttggcagcatcgtaatattctctgattccgttgcatctgcgtagacaatttttttcaccatacagcctaaaatcttgcggatgttgtactctgtttttattttcacaatgccgcattcataagtaagatctaatgtaagaatcgaaccggaactgcttcttgcttccactgacattccggtaatggctcccattttctccccggcagcggcgacatccatctccgtcgtaccgtcagattcataatataacacattttttggtgaaatggaatgtcttgccgctaagatctcattcaccgtttctgtcttatccgataaatctgccgttgcaaaccacctgtaataacggatatcgctgtcatatccatccgcactgctcttgatgtacttggaaaatgcagtttcatccgacaaatctatgtcagcatccgcctggtttaagcatgcttttttcagatagccataggacgacggatcatccacattccagatctccgcggtgtctgtgtaacccatggaagtcgaaaaataatatgcctccacaacttttccgttccatgtcagcacctgcccgcatgtcgcatccacagcggcgacagattcctttgtcttttctactttgttataaacctggtaggaggtgctgtcattgatatgtgcaccgtaagccgccagatccgcccgcatcagctgcatatagacataactgcgcgcacacaccgcctgtgtcttaagcgcttccggagaaaagcttgatggcatctcactcggcacgaccgcatacagatattcctctaacggcagttcattgacaaccgtatatccattctctgtgctgcgcacctcaatcgtccccgcataaccatttgatacagccgttccatttccattgcacagatagatcttaccgtcttccgactccggttttacgatataggtttttcccggtgccatcgtcagtgtatctgccggatgaaggagttcctcagatccggcgcttttcgtttcatcaccacaagttatattagcatttgtcgaacatttcagataaacatcgctccggatatttgttccgtcatccgatagcagaagaacacggatatttttgatatcagccggctgtaaaataagaattgcgcagacttcctttcccgcagtcacataagccacattcatattgcccaaaacgacatccgatatggatttttcagacacatctccataggtctggtaaaccggaagcttcccattgtggtggattcttccataatcttcaatctcgatctcagaatcatcataggataacatctgtccctgtatgatatcctgttttgttttgattgcagtaagcgctccatcccgaaataccagatcacatactcccggttcacaggatatccatctctcctgtaactctttttcatagacggcacctgcaaataaaaaactgattttttcatcctgacaggatttcagatatgcattttcaatcgtttgttcctgctctgacacctgtgcaattccaatgcactgatcctcttttatataaacatcataggacatccagtccgtaaaatatgtattctgcagtttcgtataaaaatctccctgattcgtgaccagaaccgtctgatcttccatttccatacggtttagcacaagcagtgtttctttttttacgctttgttccatatcaagaaacgcaaggatctgcgcatatacctggttccattctgtacgcgaaacggcagcattttttcttttttccgaaaaatcaatctgttccgaaactccaagtctttttaacagctcatccagcactgcccctgtcagataatctttttttccgccctcaaaccattcgtcccactcttcctgtgaatatacggtaaaaatcagttcctgctttacttcatcaacgctgatataattttccgaaaaaatttccggatcataattttccttcagttttcctatcagtattcctgcaaacacacaaattaaaaccgccaatattactgccgaaatttttggcatatttctttttttcacgctaatctccgtttctgtatcaaatacctttgatttccgtcattttattacataaaagaagctgcttatatttcaaagcagcttctcttcgtatttttaaatattcctttgtatatcaatgatttttcatctgtataccgaatattcttctgtacagtaaactttcttttgtactctttacttcttctgtactttaaaaatcttctgtaccatatgatcttttgtataaacccaaaatgccgtttcctacgtttttgactcctagcgaccgctaggtgggtaaccgcacgttggtttctgtcttccactgctcacgtaccgaagtactgatggcttgacatctgccttcgaatataagaatcccataaaagtaaatgtaggttcaaaaatgtagggtgtcgcacatcccaggccgtttttgatagtcttattatactttaatatgccctatttcgcaactataaattagtgccaaattttgttttactttctatctattttctctattgacaaaagctgctttacctgttcaacagcttcctccatatcatctgtccgtatggaaaagtcacagagttcctcattgtcaatttcattttccaacgataataagcggtacatcttctcctgattactgatatctttttctaaaatacttgaaatcatcttttcgcggctgcttctgcaaaataagatcgaggtcgcaaacagccgtttcatggatatcgcgcctccaatatcaagcggtacgatcggacttaccccatcctttatcattctggcaatatctgatgctgatattccatatttattgccagcatacacagttactgtcacaaaatcattttttttatttttaaattcttctgcggaaagtctctgatggattccatctgctgttcccgtcgtataagaatgaacaatcctgcctgttcctgccctctcaagtctttttgcaagttcatttttcccagaaccggatggaccgactaaagctatcacagacggtaaagaaaccggctttttatctaacagcatcgattctttgatctgatcgatcagctgtaaaaactctccataatggtttacggaaagaatcccactgagtgattcattccatgggcgccgcattaaaaccggatattttgcacaactctttaaaatattatgcgggccgtcatccagggtaacatcaaaatgaaccagtgacttctgaaaacccataataatattctgttccgggaaatccggaaatgccgtcaatatctgttttgcccgcagactcataaactgtggagcgattgctgtgataatatatactttcccctttttctgcaattcatgtatgaaatttctggcttcatcggtcacagtctgcattcgataaatgcgttcgtcctgataatactgcttgataaccgatgccttgccaacattttcccatgaattgatatcttccagtttcagatctaaaccatgttccccattggcaagctgtatcgcatgggtattcagatccgagatcacgtcatcccagtcaattccatatgtcagcataacaatcattcccccttttccataaaattcctgtcatttattttaacacttaccccatccttagaacgaaaagtaacaaagagtcgcttgcgactcttttgcgctcgagcggtgctgtttacagctaacttctactccgcgagatgcgcatcccgcccggagggctttttaattcataggacgtaatttcctatgaattaaaaaatcgggtgtgaaccagtcacacccgatcaaaatccacatcaatatgatttatttctgaggacctgcagaaactaatgctttaccagcgtcgtttccttcatatttagcaaagttcttgatgaatctgtcagcaagatcttttgcttttgtctcccactcagatgcatctgcatatgtgtcacgtgggtcaagaatacctgaatctacacctggaagctctgtaggaacctcaaagttgaacattgggattttctttgttggagctttaagaatatcaccagaaaggatagcgtcgatgattcctcttgtatccttgattgtgattctctttcctgttccattccatcctgtatttacaaggtatgctttagcgccgctcttctccatcttcttaacaagctcttctgcatattttgtaggatgcagctctaagaatgcctgtccgaagcaagctgagaatgtaggtgtcggctctgtgattccacgctctgtaccagcaagttttgctgtgaatccagacaggaagtagtactgtgtctgctccggtgtcaggatagatactggaggaagtactccaaatgcatctgctgataagaagattacgttctttgcagccggtgcagaagatacaggttttacaatatttgtaatgtggttgattgggtaagatacacgagtgttctctgtaacgctcttgtcatcaaaatcaatctttccgtttgcatcaacagtaacgttctctaacagtgcgttacgtctgattgcattgtagatatccggctcagactctttgtcaagaccgataacctttgcatagcatccaccctcgaagttgaatacaccgttgtcatcccagccgtgctcatcatcaccgattaagagacgtttcggatctgtagaaagtgttgtctttcctgttccggaaagtccgaagaagattgctgtattctcgccgttcatatcagcgtttgctgaacagtgcatggaagcgatgcctttaagtgggagatagtagttcatcatagagaacatacctttcttcatctctccaccgtaccatgtattgacgataacctgctctttggatgtaatgttgaatgcaacacatgtctctgagttaagacctaactctttgtagttctcaacttttgcttttgaagcattgtatacgataaagtccggctcaaagttctcaaattcttctgctgttggcttgatgaacatgtttgttacgaaatgagcctgccatgcaacctcaacgatgaaacgaactgccatacgtgtatctttatttgctccacagaaagcatctactacgaacagtctcttgtttgaaagttctttctttgcaagatctttcactgctgcccatgtttcctctgacataggatggttatcgtttggatattcctgtgaattccaccatacagtgtcttttgaattctcgtccataacgatatatttatctttcggggaacgtcctgtatagataccagtcataacgttaactgtaccaagttctgtttccttaccaacctcataaccctcaagacctgctttggtctcttcctcgaataacatctcgtaagaaggattgtgaacgatctctgttactccggtaatgccatacttgcttaaatcaatatttgccattgctctttaacctctttcctttaaaataatcagggtatttttaaaaaattccgctaatataaatatacacaatgttatttttttgtcaatcagtttttgtaaaataatgtcatcaattcttccgttccaactcttttacaatcggagcgatctgcaccagtaaattctccatattttcaaacatggtactcttttgggttccaagatcatttgcacgttctatgtgtaggcacaccgtatcatactctgctttttcacgctcaagtgaaccgtttacatcggctaatttttctcttgaatcatcaagcacctttgcgatttcctgctgcacctgatctgctccgccggctgctgttgtgatgcggtcaaacacttcataggtttcatctgcactctctaaactcttcccgagcgattctttcgatgttgtgatactgtgattcaaattttccgtatcctgttccacttcgacaatacttccatctacggaactgacaagacttttgatctcacttgccagattttttacttcctctgcgacaacagcaaaaccttttccctgctctcctgcacgcgccgcctcaattgacgcattcagtgcgagcatattggtctgattggcaattgaaatgatctgtcccatacattgcttgattttctgtacagaagcctgaaaatcttcaaatgtgcgctggatctcgtcaaaatgttcctgcacttccccggaactctcctttaagctgccaactttctgttgtgcctcttccaccgcttttgtgatatcttcccttacaccggcaaactgtccggatgtctcaccaactgtctcaaacgtctcatgaaaagaaccaagcttctctttcagctgtttgttttcctctaaaacggtctgaaatgtattctgaatctcctgtaattcatccagcgaatttacttccgtcaatgataactttttatggtagtcaagcaggctgtccgatacatgtatcaacggatgcagatttaatttttcttccgtctgcagcacctgttctttggtctcttttacctgttttttgaattgaaacatctgcactttcccccctactcaaataccacacaggacatggtctggtttacaaactggctgttgtagtgttctccaaagccaaccagacctgcatgcatgccaagtgttcccattgtttttaaatactgatccatataacgttcctgagagaagaacagatagcggaaaatacagtttatggaaaaaataccggaaattcttccgaaatctcctttaatctgtcgcactgtttcttcgacaatagaaggataatcatttgtctcaagcagataaagtacatcggaatcattgacctggcgataacagcacagaccatttcctgctacttccctgatagagataatacagatatcctttccgttctttttgcccagcggatttttaaatgtctggttgacaatatcctgttctctgattcccagcgtatcctgatacgcctgtcttgccggctttccgttcaattcgccgactgtgtatttgctgcggtctgtctttgatgcaataaaacggtactgtgggttcggataataaatattttccttgtaaaccctgactttgccgccattattttttacaaatgcaaacacatccgcatctgtatatactgtgccatttacggaaacctttccaccatccccggttccgccggtcagtgatattttctttttttcaaggatactgtacatagtcgtaagaactgctgcatcgtttcctgtacaaaaatcgatacatacagtattctcagatgatgcatttatcttctgcagcgccttttccaccctgcttatatatttcaccggcataatggatgcctgctctagtacatccgtcacagcctctacaccctcaaatgctgtcacactgacacctttttccgtcacactggtctggtaactcattccaatgcatccgatgcttggtacgcccggatataattcttcaagttcagctacatgtgtttcaaactgttctgcgttcgacatcagaatcaaaaatgccggattactgatgccccgtacagcttcttttaaatttccacttggacttgttccataactctcctgcatccgtctgtttctcctttatctcttttgtttcagatttcaaacatatccgcaaaaattatcctattttccgtagcatctgtcaagttttcctgatatattttacaattctttcccggtggcttttgtaatatcctgctttgtgaatgcccccggcaataattcttctaatgtaaatattttaaaatcatccggcgtatttaccaggattacctgaaatgtttccggatcacagaattctgccataacctggcggcacactccacacggataaagatagtcattggcatccccattgatcgcaatcgcagtaaattctttttttccctccgatacagccttaaaaaaagcggtcctctccgcacagtttgtcggtgtatatgcggcattttcgatattgcatccccggtatatcccgccatcctttgtaagaagtgcagctcctaccctgaaatgtgaatacggcgtataggcaaattcttttgcagcaatcgattcctgtgccagtttctttatatccatctgttttttcctcctgatttatgtataacattcaatgatttgttctcattttacccgaaaacggctttcatgaaaagtttttttagaaaactcttgtgccataagaaatacttatgatatgatgattaaaatgctttatcgctataaagtaatgaattaaaaaacatggagggttatttatgactaccaatcgtttctgcgaaatcacccacgaattacagcatctgtcaaagctcagtgagcagtgtgccagaattgatcctgctctctatgcaaaatacgatgtcaaacgcggtctccgcgatattaacggtaaaggtgttttagtcggtcttacagaaatttctgatgtatgctccacaaagatgattgacggcaagctgcgtccggcagacggcgagctttattaccgcggttataatgtcaaagatattatcgacggcacatcggaaaacagtcattttggctttgaggaatgcacttatctgcttcttttcgggaaacttcctgcccggacggaattaacggaatttacgaaaatgctcagtgaatatcgtacccttcctaccagttttgtccgtgatattattatgaaagccccaagcaaagatatgatgaacacactcgcaaggagtgttctcacactttattcctatgatgaccttgcggatgacatttcgcttccgaatgtactcagacagtgtttacagcttataagtctgttcccgcttctttcggtatacggttatcaggcttacaaacattaccatgacggtgcaagcctttttatccatccgccaaaagctgagtattccaccgcagaaaacattctgcatattctgcgtccggacagccagtttactcctttagaagcaaagcttttagataccgcactgatccttcacatggaacatggtggtggaaataactccacatttaccacgcatctggtatcgtcatccggaacggacacctattctgtgatcgctgcttccttaggttccctaaaaggtccgaaacacggcggtgccaacatcaaggttgtccgtatgtttgaggatatgaaagagaatctctccgactggagcgatgaggaagaaatcagtcgttatttaagagccttattacataaagaagcctttgatcacgccggtctgatctatggcatggggcatgctgtatattccctttcagatccccgtgcccgcattttccgttcttttgtagaaaaattgtctgccgaaaaaggctatgaaaaagagtttgctctgtatgatgccgtatcacgcttagcaccaaaaatcatcgcagatgagcgtcagatttataaaggtgtcagcccaaacgtcgatttttacagcggctttgcttacagcatgttaggacttccggtggaactttacacaccgatctttgcaatcgccagaatcgccggatggagtgcccaccgtcttgaagaggttgccatcaacggcaagattatgcggcctgcttacaaaaacatcggagaacacaaagaatatattccaatggaaaaacgctgacccgccggtcagcgttttttatccgctatcgttctatcttaagttcaaaccagaacgtcgaaccgcatcccggttcgcttaccacaccatatccggcatgatgaagttccagtatattttttacaatggaaagtcccagaccggttcccatcacagcacgtttatgtgtcttgtccaccttataatagcggtcccacacatacggaagtgcctcttttgcaataccatccccactgtctgtcacttcgatccgcaccttatcccctgaaattttctgacgtacccacaccgttttatctttcccggtataattaatcgcattgttgatcaggttgtagattacctgataaatcttgtattcatctgcttttacctgtacttttccgtcatattcgaaatgaatacagtagccatcctgctcttttaatttattgtagcgctctaaaacagattcgatgctctctgtcagattgtatactgtgtcatttttttccataacaccagcctgaagttttgacatatcaagcatatcattcacgagatttgtcaggcgcccggcctcatcgatcactacctggacattttccggtgtattttctcccggaagatcccgcatgacctctgaataggcaatgatcatcgtaagcggtgtccgcagatcgtgcgatacatttgcgatcagttcccgccgcagggactcatttttgccaagttctttcgccgttgcattgagcgtgtcggacagttccgccacctcacggtaatctttcccctcaaaacgcacatcaaaatctcccttggcaagtgctttcgccgactcattgatccggatcagtgacttggaaatctgtctggatattaaaagagcgatccccagtgaaagcaggatcatgatcacagtgatccatatcagttcgatccgcagtgtattaacagttgcatccaccggagtaagctgcgtattgaccagcagaatctcttcctgaccgtcacactctacaatttttacatagatcacacttttgatgtgttcctgtccgcgtttctgcaaaaaaccgtggaatccgggtccatctgccacatcttctggttccggcatatcttcactccagaattccggattgatcccgccctcatattcgattttaaaaatcccgccatgttcttttgcctgttcataataatactgtacctgttccgacggcatatccgcaagtctggaatttacaatatactctgcgctgcaaatctcatttccatccgtatttgtcacatagactgccatattatttttcgctgcaatgtcatggatcagagtgtctttatcatcctcatccgaggtcagtatatttgcaaccgccgacgtgacctgctctgcttccctgcttttgatcatggtgtagaacgaatccagataacagatctggatcagccataacacgacaagaagtattccggtaaagacaagcagataggtaaatactctccatttaatactgattttttcatgcttcaaaccggtatcccacccctcttaatgtcactaaaaatttgcggtattcacccagactgctccgtaaaagtttgatatgggtatctaaggtcctgtcatcaccataataatcatacccccatacctctgtgatcagtttttcacggtcaagtgcaatattgcggtttcttactaaataaaacaaaagttcgtattcttttggcgacatttccacacgcttgccatccacagtcacagttcgtccggtaaaatcaacaaccagaccttctgcctgaaagatctcatgtccgtcccgtacgtcttttttattgtttctgctgattacaacttttacgcgcatcataagctcacgtggcgaaaacggttttaccacataatcgtcgattccgagttcaaatccatggatcttgtcatactcctcgccgcgtgccgagagcataatgacagggatctctttgaacttgcggatttcccggcaggtggaaaagccatccagttccggcatcatcacatccagtatgatcagatcaaaatcttctttccggcagatttcaactgcttccattccgtcatgtgcctccgcgatctcatatccttcaaattccccatattttcgaatgatcgcacggatcttgtcctcatcgtctacaactaaaatacgttccataacgtcccattttctcccacaaattgacattttttctattcattactataaccggcttatgtgatggctgtgtgactgccatctgatcaacatcttaaatatgcaggaatttttccctggcagtctttaaactgttctgaaaccacaaaaaagatccaaggaaaatcacaagttccagcagcgtcagttttcctaagaaatttgtgagttcgttgatgataccaatcagtcccaccagtgccacgattcctccaaacaccgcctctctccagtaaataaatgcaataaatcccgccgtatccttacattttttcatctcttcctcagcgatcaccatagcattgatcctgccgctttttttcatctgaagtgacgatatcaccatataaatcccaaaaagcagaatcactgcgtcaaatacaagcattactttcattttaaacctccagcataaaaattcttattttgacattctttttgtcccatatttttattataaacgcaatataaaattggtgcaactgaacgttttgttttgtttttttacataaaatcccatattttcggtcaagaaacattgaactcttgcgccgattagtgtaaaataaaaataacatacttatagatgggggcaaaaaaccatgaaatttgatgacacaaaaattctcatcagtgacgattctattttagcaagaaaacagttaaaggatatcctctcccagtttggcacaccaacatttttagaggctgcaaacggacaggatgctattgatatttacaaaaaagaatccccttcgcttgtatttcttgacatcgttatgccgatcaaagatggcaatgctgtcatacatgagattactgattttgatccagatgctactatcattattgtctcttctgtcggtacgcagtcccagctccgcgaagccattgaggcaggtgccagtgattttatccagaaaccgatcaatgcggatcagatcgaacatattattacttcaagatttgaagggagatagacatgtacgctcaatttttcggaaactatttattatcacacgggatcacaaaagaacagctgatgcatgccatgcaggaagcaaataacgaacatccaaaattaggaacccttgccatgcatgcaggctatatgtcagccagtgaagtggaccgcgtaattatcatgcagacacatgaagacaaacgtttcggtgaacttgccatccgggaaggttatctgacagaagctcaggttacggagctgctgcagacacagaatcctaatttcttacttcttggtcaggcattattaaatgatggtgttattaataatgagcagctccagtctctcatcatcggttatcagtctgagaatgaactttacgatgcagatatgtccgctgaaacgaaggatattgtagatcaccttgtagaaaatttctttgttattgctgagcgtccgctttcacctggagagctttctttcctgcatctcttatttaacgatctcgttcgttttatcggggatgatttttcaccggttcgccctgaactttgtaaagaatatccgacaaactattgtatcaggcagcagatcaatggtaaattttccattcgtacttatatcgatatgccggaaagcacctgcattgcatttgcatcccgttatgtcgatgaagattttcacagttttgacgaatatgtacagtcttctctcgaagatttcttaaatctccataatggtctgttcaacgttaatatgtcaaacgaacaggggcttgaactgcagcttgatgttccaaatgttgtcacagatgaactggtcacatttgaacacgaggcatatatgttaccgattgtttattcattcggaacaatacattttatatttgagttgattcataatgaactgtaaacaggtacatcataaacaatagagtgactgttattatgaacagtaaaaacggctgtgcctttgggcacagccgttttctattctttttacattccgaggaactgttttacaacctttggcatctcttctacttcgcataccgtcttatgacgtacctcagcactacggatctcctctattgcctgcgggatttttacgttaccgatcctgcttaattcatccactaattcaaactctgataaagaatcatattttggatcaatggcatccataacacttctgctgaatttaaatgggctggctgtggaagcgatcacagtctttgtttccgcatcatttgtgtcttttttgtacttgtgatatacggatgcagcaactgctgtgtgtgtatcaatcacataaccggttttctcatacagatcgcggatggtatccgcagtttctttctcactcgcataattgccgtaaaagtcagcaagtttctctttcatctctgatgtaatctcgtatttaccagttgtattaagttctttcatcaatgccgcattcttagctgcatcctctccggcaatacggtagatcagacgctctaaattactggagatcagaatatccatggaaggagaacttgtcagcataaattcacggttcttatcatatgtgcctgtggagaagaaatcataaaggactttgttctcatttgaagcacagatcagttttgcaaccgggattcccatattttttgcataaaatgcagccaggatatttccaaagttaccggtagggaccacaatattgatcttctcatcttttgcgatcacaccgtttgcatataattttgcatatgcatagacataatatgcgatctgcggaaccagacgtccaatattgatcgagtttgcagaagaaaactgatatcctgcagcatccatctcctttgcaagctctgtatctgaaaacattttcttaacgccggtctgtgcctgatcaaagttaccgtggataccgacaacaaaggtattatcacctttctgtgttaccatctgtttttcctgtaccgggctgacaccattctttggataaaatacaatgatcttcgttccctttacatctgcaaatcctgccagtgctgcttttccggtatcgccggaagtagcagtcaggatcacaatatcatttttgacattgttctttcttgcagcagtgatcagaagatgtggcagaatggataatgccatatctttaaaagctatcgtcggaccatggaacaattcaagataatacgcaccatccgcatccaccaacggtgcaatctcttctgtatcaaacttactatcataggcagcattaatacagtttttcagttcctcctctgtataatctgtcagaaacagtttgagcacttcataggcagtctcctgataagtcatcttagaaagttcttccatgcttacatccaaagacggaatctcagtcggtacatataaaccgccatcatttgccagtccttttaaaattgcctgtgatgctgtcactttttcatttgcgtctcttgtgcttgcatacattaattccattttcttcgtcctcttatctttttattcatcgtaatcaaatttcggggttctaatactgttcggtattatatcaatacgttttcgtatgattcccaatactttctaaacattatataggaaacgattgcttcatgtcaatgctttaacgtatgaaaatattattttaccaaaattgcagccggttgcatcctgcttcgaaacgtgatatgctgaatacaactcactaatgcaccataacattttttgaaatggagaattcttatgttaaaaggcgtttttcctgccacaaaaaaagatggaaccatctactatcgtacaagcatcaattattccggcaaacacatcagccttggaagttttgcttcagaagaaatggcgcatctggcttataaggaagcatcccagactctttctgacgccgtcataaccattgacaatgtctattcacacaaaaatattctccctcatgaaaaaatcatcattctgcttaatttccgggacaatggactttattttaaaaatccgatctatctgcgcaaaggatatttcagctattttctttccgaacatgaggaattaaaatttgatattgatgatcttttttattattccagccataagatccagaagcggcagggacatctttttgtcagtgattacggaatgcagtattccattctttcacgttatgggatccgtccatacgcggttgccggaagagattatcagtttgtaaatggagattcttacgactatcgctatgccaatattcttgtgatcaatcgttttcacggtgtcttgcgtcatatcgtgaaagggatcacaaaatatcgcacaatgatccacatcaatggcaattatcttgtcggcacttattccagtgaggaaaaggctgccgtggcatataacaaagccgtagatctcgcaaaggctgccggaatcaaaaaggattttcccgaaaattatgttgatacactcccgccaaaggaatatgcagaagtttatacgaaagtaaagctgtctgaacgttatctttcctatttagaagaattttcaaatagcccagcgtaagtttcttgtatcttccacttaaaagtagtacaatagaaccaaagttttttcactattcctactgaataactatatataagaggagactttatttatgaagcaaaccactttcagcgatcttgaacgaaataacaaaacctgtatgtatgcacatctgattgattcaagtatcatgacacttttctgtatcctgcaggcgctttccggacttcaaacctggggatatatcattatcttcgcagttttgggttttggaccggttattgcagagtttttcttttggaataagtcacatgaaacacccgcgatccagcatcttgttgccatcggtttcgctgttttttacagttttgcaatcttcactgcaaccaacggtctcgtatttttatttgttatcccgatgatcttaatcatctcagtttataatgatgccaaatactctctcataatcaataccggaacagtcatcgaaagtctcatcattacaattatgggggctcagaccggaaagtttggctactccggacaggacaatgccgtgatccaggttgtcatcatgatcatggtcggtatttattcttattttacatcacagacattaaatatcaatatggcacagaaaatacagcatgcagaggaatcacagtcacagtccgaaaaactgctggcaaacctctctgaattatcagaccacgtcaatcagaagatcaacagcatccatcaggagcttgataaattgagcactgcagctcagaccacacagcatgcaatgcaggaagtatcaagcggtgctgccgaagcaacgaatgccgtaatggaacagggttcccagacacaggaaattcaggataagattgtgatcgtcaatgatgtaacacagcagatcgatgcaaacatgaaacacactttagatatcgtgacagaaggcagtagttccatgcagcttctcgccagccaggtagatacctctgtccaaaacagcgtggatgccgcatcaaagttagaaactctgaaccataacatggaagaaatgcattctatcgtggaactgatcggcggtatcacttcccagaccagtctgcttgcattaaacgcaagtattgaagctgcaagagccggagatgccgggaagggatttgcagtggttgcatcagagattaccggaatggcttcccagacaaaagaagcaactgtaaagatcacggaactgatccagaatgttacttcagctatcaacgaagttgtcacagtcatccagcaaatgatcgatggaatcaatcaggaaaaagaaagtgctaaaaacacggcaaacagtttctcctcgattcaggaaaacacgctctccattcagagtggtatccagaacctgaccgtaagtacctcagagttaaaagatgcaaaccaggtcatttctgattccgtccagacactctctgccatctcagaagagcttactgctcatgcacacgaaacattagaagccgaaaataaaaatacagatatccttgatactattgcctcaaagatgcaggagcttgtaatatttacacaaaatcagttttaaatctatttgatcaaaaaacatccggcagaccttttttagttgccggatgttttttatgtcatataatattggcaggaaacgtaatgtcacctttttactgctttttatgcaaaccaattctatttgcttaaatattttctaccgcatcacgcagttcatctgccatactctgtacacaggatgtctgtgacgaaatttcctccgatgttgctgcaatcgttgccaccttctcattcatttcattgatattttcaatcagatctttgatagaatcaatgcttgcattaatcttaggaatgatttcttctgcttttgcattgttctctacaatcagttttttcgtcgaatcggacaattcacgtatctcacttgcaactactgcaaatccacgtccagcctctccagcccttgccgcctctatggaagcattcagggaaagaagatttgtctgccctgctatggaagaaatatcctcattgcttgctttataaatattgataaaatcagacatcgttgccaatgaactgtttaactcctgacagaaattggagatctcctgaatatgctgtgcaagcgtggtcgcctcatttgccgaagtttcattcgcgtcacccagctgatcaatattttcactcaaagatacaaactgttctgtaatatcggcaagtttctgattatgaatttcttgtttctgctgttcctcttccatcagattctggatcttttctttttcattctccgcaacactcttgacataatgtacacagttttccttgacatttacaccattataaattgcccttgccatattgcgacaggaagaataaccacaggactcacaattcattttctggctggcagcatccgtcttattcatggaagcaaaaatctcctgcatttcatgctccgcaggctctttaatctcaacacttttgtttgtatatttgcgtacaaaatcattgatatctaaatcttcaaatgctttcatcagatttaccaaacgatccttctccggtacggattcgtcccatggtgaaccattctttgtcttcttgccaaacaatcctcttttcgcgtctgctcctgcatttgccgttttgtttctcatatcactgagtgtgagcataacatcatccgtattgcgctctaactcagtagctgttccatagatgcatcccttagagcagtttaaaatatcgaccataaacggctgtctcttattctttttgatacgttctaaatactcatgcagatagcgataggcttccttttcgccttctacctgtcttaccacctgttcttttccaaggaaatgttctacgttttctcttaaaccacccggcatcggataaagagcacccatgccatattccagttcgtcctcatattccttacagccctgatatttatttccaatcgtttcaaaaagctttttaaatgtcacattatattttacatagccatagcaatttggatctgtaatctctgtcttctttgcgatacaaggactgataaatgcaagttcatcatcacattttaaatatttttttatgtaaattgccatacacatcatcggactatgaatcggcatcattttcggcagtaattccggaatatatttttccacataattgacaactgccggacatggctgggaaatgccacccagaaactgatgttctgtaatatattttaaatatccccatgtcgtgatatctgcaccgaaagaaacactgtaaatatgatttacaccttttttcttcagatatccaagtacctttttatactcatgcggataatttgccaaaaatgcaggagctaaaataacagaaatcttttttcctgcttctaatgctgtaaaaaatgattttgtgtcatcctgatattctctggcattatgctcacatgcatcaaaacatgccccacatgcaatacatttttcagagtcaactgttacctttcctgcatctgttgcaacattggcgatcagcaccggacaatctcttacacatttgttgcatccggtacaattatcatttgcgtaaataagttccattttgtccacccgctttgtataattttcacaaaaaatatattgttatagtgatattttatcatatttttgtgttaataacaattttttatcacttatttttttgaatgtttataaaataatatacaaaagaacagaccgctttgagcagcctgttcttttgttcttctaattgtacttaaattaaagaataatcttcttcggacatttctgtgcacagataccacatccgacacatttttcctgatcaatatatgctacattgtcaatgacatgtacggcatccttcggacagttcttctcacagagatgacatccgatacatccaacggaacatgccttcattacattcttgccgacatccttagaactacactgaacaatatgttttgctgagtaaggaaccagctcgattaagtgtttcgggcaggcagccacacatttaccacatgccttacatacttctttatcaaccagcgctataccatctacgatatggattgcatcaaacggacatgcctttacgcaggagccaaaacctaaacatccatagttacatgcctttggtccaccgtttggaacgaacatcatagatgcacaatcctcattaccagtatactcgtaatctttctgtgtcttgtcacaggttcctgcacattttacgaaagcaacttttttctcacctgcacctgcatctacacccatgattgcaccgatcttagctgcaactggagctccgccgaccggacactggttgactggtgcttcaccttttgcgatcgctgcagcaagtccggaacatccggcataaccacaaccaccacagttatttcctggaagttcgcctaagatggcaacttccttctcatcaacttctactttgaatttttctccggaaataccaaggaaaaatccaatcaagatacctacgccgcccacaacaagggctgcaactaatattgctgtaacgttcatcttatttttcctcctaaatcattcctgagaatcccataaacgcgatagacatcaaagctgctgtgatcagaacgatcgcagtaccctgaaatggttttggaatatcattgtattcaattttttcacgcagacctgccatcagaacgatcgcgatcaggaatccgaatgcagttgcaaaaccatttacaacactctctaagattccatattcttttgtaacgtttgttaatgcaacacctaatacggcacagtttgtagtgataagaggaaggtatacacctaaactctgatacaatgccggcattgatttctttaagaacatctcaacaaactgtactaatgctgcgataacaagaataaatacgatcgtctgtaaataagtaagatcgatccccttgctcatcagatagctgtttgcaagaataaatttatagatcagtgctgttacaaacgaggaaatcgtgataacgaacacaactgcaccgcccattccggctgctgtctctgttttcttggaaactcctaagaacggacagataccaaggaactgacttaatacaacgttatttacaatcgcagaaccgattgcaatcaaaagtaattctttcatctgtacctatcctcctactcttcttttccggcagcatctgcttttacagttgctttaccgctgcagtgtgcagcctggctgcagccggagcagtcgccgctcaagcatcctgcaggctctgctaacggttttccttttgcttccatcttcgctcttacaatgttcataatagcaaccagacaggacaatactaagaatgcaccaggagccataacgaaaattgtgatcggtgtaaaccattttaaggataagatctggaatccgaagatctgacctgctcctaaaagttcacggatcaaaccgatgcaggtaagaccaaatgtaaatccaagtcccataccaataccatcaaacatagacgggattaccgggttcttagaagcataactttctgcacgtccaaggatgatacagtttactacgataagaggaatatatacacctaaagactcggaaaggcttggtgtatatgcctgcatgataaactgaaccatggtaacaagtgatgcaacgattacgatgaatgccggcatacggacaccatccgggatcactttacggaatgctgaaatcagcatattggataaaataagtaccactgttgtggaaagtcccataccaagtccattgattgctgaggaagtaaccgccaatgtcggacacataccaagcatcagaacgaaggtaggattctccttgataataccgttatataaacgttctacatttttgttcattaatttgtacctcccgctaaaacattctggaagtatgtcaggcaggcatttacaccgttagccatagcttttgatgtaatggtagaacctgaaattgcttcgatctcgttgtcggctgacggagctgacttaacaacggtaaaggaatctacttttttgttttcaaactgaccgtagaaatcttcttcctgcgccttcataccaagaccaggtgtctcagaaatagatgtgatggaataaccatttacagttccatcattctggatacctacggagaatgtgatagatccctggcttccgtcctttgcggttaccgtaaatacataaccaagtgtattttcggatgcatcctgtgctgcaactactgtctcgatctcatcggaatatccgttttcatctaacagagcctgtgctgcgtctgcatcaaaatctgcataatctgtaaaatgatctgcatctgtaaatacctgtttgtaggcattctgtgttttttcttcatttaccttgtcaattgaaggttttgtgacaccgtacacaactccaagtaaaagtccaagtacgattgtaaaagcaaataaaattaatgcgtcatgaacgatcttcttattcatcttatttgcctccttcctgctttttggcttcttttaccatgccaaatgctctcggaaccgtgtatttctcaatcatcggaactaaaatgttacttaagatgattgcgaaggaaacgccctcagcgtttgcaccaaagcagcggaacagtccggtaaagataccacagcagataccaaagatgatctgtcccattggtgtgatcggtgaagtaacataatcagtagccataaagaatgcaccaagcatgagaccaccaccgcagagctgtgctgtaatataagtccagtcagcaccatgtccgctgaaaagaagcatgaaaacaataaatgtgataatatagcttgccgggattctaagatcgataacacccattaaaatcaggaaaattgcaccaatcagaatcgcgatcgcggaagtctcaccgattgttccggctgtacgtccgatcagcatatccatcgtattgaccggatcaccatttctcattgctgcaagcggcgttgctccggtataggaatcgatcgtaaagttcgtcatgttagctgcaaatgcaatcagaagaaaacatcttgcacccagagcagggttcatgaagttctgtcctaatccgccgaacatacattttacaaccacgattgcaaatacaccgccgagtactgcttcccaccatggaagtgtagccggaaggtttaatgctaaaagcagaccggttacaacagcacttaaatcattgatcgtctgttttttatgtacgatcttattgaagatccactctgatgcaacacaggatgcgattgttactaaaattaaaatcagtgctctgtatccaaagttataaataccaaataaggttgtcggaagcaatgcaataattacataaagcatgattctttccgtcgtatctttagaacgcacatgtggtgatgatgaaacatgatataaatcactcacaggaatccacctctttcttcagttttaaaaatttatttttcatatttccattattttttgcgttttgctgcaagaacctgttttttcatggtcttgatagactgtgcaagctgtctcttagccgggcatgcaaaactgcagcttccgcactcaacacactctaagccatgccatttttcaaattcttcggaaagtcccttatctgagaacttcgcaagtctcgacggaatcaactgctccggacatgcttctacacagcgtccacagttgatacatgctgtctgtaacttttctgcagcagcaacctcatcctgtgacatacataacagggaggatgatgtctttgtggtcggaacgtctaatccaaacatggcaaatcccatcatcggaccaccggaaataatcttctcaggctgtactttaaatccacctgccgcatcgacaagttcctgataactcgtaccaatattatataaaaagttacctggatgctctaccgcatcacctgtgatcgtagaaatacggtttgttaccggcttgccaagtttaactgcattgtagatggcaatgatcgtctcaacgttgtcaacgatgcatcctgcatctgccggaagcattttggaattgatggaacgtcctgtcacagcataaatcaactgacgctcaccaccctgcggatactttgtttctaatggacatacttcaatacgcggttcatcctttacaagttcctgcagtttttcaatacagtccggtttgttattctcaataccgaatacaccctttgccttgtcaaaaatctgaagaatgatcttcatacctccgatcagctcttccggattttctaacattctccgataatctgcggtcagatatggttcacactctgcacagtttgcaatgatatactcaattttttccggttcttttggtgataacttcacatgagtcgggaaacccgcacctcccatgccgacaacaccggcctcttttactttaccaatgatctcttcttttgataaagttgtcacatcttcacatggcgtataagaaacctcttcgaacgctccgtcgttttcgatcacgatggaattgaccatatcgccaactgccacacgacgcggttcaatagcttttacagtaccggaagcagatgcataaattggagatgatacaaaaccgcccgcttctgcgattttctgtccctttaatactctgtcgcctttcgccactatcggacttgcaggtgctccgatatgctgtgataacggatacaccaggtcgcccttgggtaaaacttccacaatcggcgcatcctttgctaattccttgccttcgtaaggatggacgccacctttaaatgtctttaaacccatttttcgtgccccactttctcttaattgtattctattctatgatatgtctcatagaacatttatcctattgattataccacaaaatgatacatattccatctattccttgtattttttttagaaccttttgacaaagttttcacaattattgagataattccatcaattaatggcattttctttttctttttatatgtgataaaatagtttattatgaaggaaatcagggaggatttatatgaaacactggcacgaagaaatgccttttacagcagataattcactggcagaactgatatttacagagaattctcttttttttgatatagaaacaaccggattttcagctgcacgcacatcactctatctgatcggatgcgctgcgcggaaagaaaatctgcttattgtcgatcagttttttgcagaaactccggcagatgaatcggatgtactgcatgcatttttggattatctgcaaaattttgatacgatcatcacgtttaacggaatcggttttgatattccgtacctgacaaacaaatgtcagaagtacaaaataccagaaccattttccgcttatgaatatgttgacatctataaaatgatctcaggctttcgttttctttttgcccttccaaatttaaagcagaaaacggtagagcaattcattggtttagaacgcgaggacgcatataacggtggtgaactgatagatgtatacaaggcatgtcagaaaaatccagataaaaaacttatctctcttttaaagcagcacaattatgaggatgttatcgatatgccaaagcttctctccgtactgtcctatgtaaagctgtttgagggcgcatttaatgtgacatccatctgtgccaatgaatctgtctcctatgacggcaaaccctgcagggagattctcttttccatgcaaaacatttttccggttcctaaacgtgtttcctgtcattatgaggatttccatctggttgtcgatacagaccagacaacactctgtgtccgtttatatacaggggaactcaaatattttctttctgattataaaaattactggtatctgcctgaggaagatctcgccattccctcaagccttgctgcctcgattccaaaagaacgaagaaaaaaagctaccgcaggaacctgctataaaaaaaagaatgccatttttgttccccagtatcaggaaatacaaaaaccggcattccatcttatgtttaaagataaaaaaagttattttgaactgtcagaagattttgttgcttccagtgaaatgcagaaagaatattgtatgcatgtactgcagtttatctgtaagaaaaaactgtaagctgccatccattccttttataatctgatctggccagccttactccatgcactgtaaacctttttgccatctgccagcttatatgttcgtatctgcacataatacaccgcattatttttcagtttctttatttttaatgtggtgtttttatttctggtaatcacttttttctgcacatttttcttcatctttgaatcagtactataacgtatctcatatccagtggcactatctgcttttttccaggatagctctatctccccggcgtttacgctgacacttttcgtaaaagatgtttttttcggtaatattttaaatgtttttgtgactgttccaatatacgcaccttttccactgaccagtactgttgcaatgccgctttttttattatttttatacttcacggtataatcagtgccttgctttaattttttccctttcaatgtaacagtcacagccggcttcttcgctttgccatcgtatgtataagtatttttattgagtgtacattttactttttttatgctggctaaattatccggattttcaaattttatatgaaatgtctgataccagccattctgaacatcatattcataagaaaccgtgtttgtttttttatccgtcagtgtaacaacagaaccatatcctccatcacttctggttcctcctgttacttttccaatctttgacatatcaaatcccggcaattttgccagatcaatcttttttccctttgcaatggtataatactgattatcaaatttataccatcccagccctgatatattactaatatcaaaactggtaagttcattatcgttcagctctatattggtcagatttgtagattttctcaaatccaaatatttcagtctgtttttctggcagtctaatgtacgcaactttttattttttgtcacatcaagtttcgtaaggttatttcctgcacaacgataggtaaccagttttttatatttagaaatgtctacacttccaacccctgtatatgcaacatccagttctgtgagattcacacatcccgtcaggttgaccgtttttaattttggtgccttatgacatgcaaacgttttaagacttttacagttgctgagattgattctttcaatattaggaattacaggatcaacatatgttccatagccatatgcggcaaattcagcctcttttaaatacttattattgctcagatccaattctcttagtttctcaagtttttcaaatcgatccacgtcaaaaattttcaacgatgtattcacacattttattttttctagtttcggtgcctctccctcaaaatacacttcctcaagtttgttatatttacttaaatcgagactggtcagcagtaaattttcaaaagttattttttgtatcttttccggtaatttcaagtccgtcagtttaccggcattcacttctaactctttcagtttactacactcctgtaaattcagcttttttaaacctccagaactgatacgaagctttttcagacttttacagccggtaaaatctatatttttcagattatcctgatctaaagtatcaaactcagtcagttcggaacatcctgacaaattcagggttttcaaataataatcttcaatatccagtttttcaagattcgcacatccgtttaattgtaaattttccgtggagccttctaccgaaaactcttttaaatttttataattacttaaatccagtttttttgacgataccccctcaacatgaactttttgaactgattttggaagtacaaaatcttcactcagttttaccgctttcaacgaaagttccaaaatcttctgttggctgttcaaatccagtttagcaattgaacttctatcctttccgtacagattttcaatgtcaagctttttcagtgcaatacaaggactcagatctaatgcagctcccatatattcttttattgtcagtgtttctaatttttggcatcctgtaaaatcaattcctgcatccaaatctatacccgcatctatagaaaggctttttaatgcggtacatccagaaaacgacgcaactctcaaatgatcgactttataagcatccgatatctctatctcttccaacgaactgctattcataatactgcagataccatctgtcaaaacaatttttttcaggtaccgtaaatattctattccctccgtttgtattttttcctcaaattccagctttgtaatcttcctgttttcggaatctgccaagagaccatctttattggtgtcatatttcttgatttttttgcgaaattcattatccggaaaattcgtttcattgattgctatacttccgtcctgatgaaatccttcatccagttccggctcgtccggtttctccggctcttctgtcccatcatacaccatccagacactttcttccgcttcttctgtatcgtcatcatccatgatttccccggtctctgtctcagttgtctgctccgtatttttcccggtttccgtctcctcggttgtctgctccgtatttttcccggtttctgtctcctcagttgtctgttccgtgttttcttctgcacccgtcccggttatctgctccgcagtatccgtttctccaccgttctcatcaccgtaatctgcaaaaatgctctccgtggtctgtgtattttcctgcgcacaaatgtgtacgctttcctgtaagctaaatatcacacccacagccagtccaagcgacaatattcttttatatatttttttcattttcaacctccaaataataaaacagcctatcatttcctgataagctgtttttaattatgtactgttactttttctcaaagaagaaggatgtatgtctgtcaaatccaagttctctgtaattcatgatctgttctgtacttccaatgaaaagtacaccacccggctgaagcgctttatggaacttctgatagatcacatcttttgcttcttccgtgaaataaataaccacattacggcagacgatcagattgcagccactcggatagggatcttttaacaggtcatgctttttaaattccaccctttttttgatctcatctgaaatctgataggaagaaccaacttttgtaaaatacttctttttcagatcatccggcacagaggcaatactcttttcattgtacagtcccattctcgccgtatcaagcacctgattgtcgatatccgttgcaatgatcttaatatttgcaagcggaacctgtcttgaaagtgccatgacaagggaatacggttcatctcctgttgaacatgccgcactccagattttcaggttcttgccaaactttttgatcagttccgggaatacctgtccctctaatatcttccactgatccggattacgatagaattcagaaacattgattgtcaggaaattgatgaactgatcaaatttttctttatctttcttaatcagtgctacatagtcattgtacgtcttaacgttgttcttcgtgatcagcgtattaatacgacgacgcatctgtttttccttgtaagaattcagatcaattccggcaagctgcaaaatgtcctttttaaatttttcataattatcggtttccagcataatctactttcctcctgtttccttttgcacaaaagttctgtaaaaccagatttactttcatgccatatcaaaaataggctttacacattccgtgaaagcctatttttatccatattactgtatacggaatttagttctcttctgctgcaactgcatcgatatcgacatctgcaacatcagcatcttctgactcatttgtctccggagcaagtaatgctttgatggaaagactgatcttcttctcgtcctcgttgaaatcaacgatcttagcttcgatctcctgacctacttttaatacatcagatggtttctcaatatgctcttttgcaatctgggaaacatgcagtaatgcgtcaacacccggagcaagctctacgaatgcaccgaaatctgtcattcttgccacttttccttttacaacgtttccaaccgcatatttctctgcagcaccattccatggattctctgccgggaatttcatgctgagtgcaatttttgtatcgttgatatctttgatgaatacacgcacatgatcaccaacattaaatacttttttcggactctctactctgccccatgacatctcagagatgtgaagcagtccgtcagctccgccaaggtcaatgaatgcaccgaagtctgttacatttttaacagttccttccataacatcaccaactttgatctttgcaaacagctctttctgctgctctaatttcttagcaactaaaagctgttttctgtcgccgatgattcttctgcgttttggattgaactcgctgatcacgaactcgatatcctgatctttgtacttggataaatctttctcatagctatcagatacaaggcttgccgggataaatactcttgtttcatccacgatcacgcagagaccgccgtctaatacctgtgctacttttgctgttaatacttctttgttttcaaatgcctcttctaatctcttgctgcctttttctgctgcgagacgcttgtatgtgagtaatacctgtccctcaccgtcatttaccttaagaacctttgcttccatggtgtcgccgacagataccagtgttgttaaatcaacgttagcttcgttcgtatattcattacgagtaatgattccgtctgatttgtagccgatattcaatacgatctcatcaggttttacatcgataacggtaccttcaactacctctccatttcttattgttttaaatgattcctccagcatttgttcaaagctcatttctgacattcttttgaacctcctcaataattttgtttggggtagaagcccctgcggtaatacctacgctatcgatggactcaaaacatgtgatatccaaatcttttacagtttgtatatagtaagtattgttgcattcgtttttacatatttcaaacaacttctgcgtattggaactatttctgccccctatgacaatcatggcgtccacatcacgggcaatctttgctgcctcagtctgtctttcctcggtggcattgcagattgtatttaaaacaattatatcataaccttttttatttataatttcaactaattcttgaaatttattgtaattaaatgtcgtttgtgctacaatacatacctttttcccagattttgcctgatatttttctgcctcttccggggttgcgatcacagccgtatgcggatcaagtgaccagcttttgattccttgtacttccggatgcttttcattcccgataattacgatctgcgccccttcggcactgtgtttttccacaaggcggtgtatctttaacacaaacgggcaggttgcgtccaccaatgtatagccaagttcttttattttttcagatatgcccttttccactccgtgtgcacggatgatgaccgttccgccatgcgccgccctctcttcgagttcttctacgctctctaaaacagtcactcctttttcttccagatcacgcaccacctcttcattgtggatgatcggaccgaatgtatagattggctgtctctctgcggcactcatttccagctgctcatacacggtatcgaccgcgcgctttacgccaaagcagaaacctgcactttttgccaatgttatcttcatattttatgtttccttattttgcctctgaataaacctgataaatggcatctaccacttcatcaatattcatttccgaactgtcaaccaaaacagcatcctctgcctgacgaagcggtgatgtttcacgatgcatgtcacggtaatcacggtcaataatatctttttcgatctctgcaagatcacagcttactcctttttccgtcagctcatcgtatcttctctttgcccgtgtcgcagaacttgctgtcagatagattttgacctgtgcgtccggaagaacacacgttccaatatctcttccatccatgatgacatctgcagactttgcaagctgacgctggagttccactagctttttgcggaccaccggatagacgcttgtggaagatgccatatttccaacttcctcattgcggatcacaccatttacattctctccatttaaaagtacctgctgttctccgttttcataagtgatcgtgacatccacgtccgggcatgctgccgcgatcgcattttcatcttttgcatcaatgttatgctgtaaaaaataatatgccatcgcacggtacattgctcccgtgtccacatagataaatccaagttttttcgccagccgctttgcgatcgtgctctttcctgctcctgccggtccgtcaattgcaatattcatactcatgttttattctccttttacattttgctgtgttttttatttcctattcttttgtccataacaatccatagatttataacgctttatcatctgttatctttcatccggctgcgccgctgagattcccgcaagataaccggtggaccatgcaatttgtaaattataaccaccagtcatcgcatccaggtctaacacctctccacaaaaatataaatgcggcaccagttttgactccatcgtagacggattgacttcttttactttcacgccgcccttcgtgatgatcgcttcgttaaaatcacggagtccacacagtgtgaccgggaatgccttgatcagtccggtaaaatgtctgcgttcctctttggtgatctcattgacctttttctccggatcgattccgctaagatccagcatgaccggaatcattttagccgggaaaagcccaccaatggagtttttgaactgcttgttcttcgcctcatcaaactctcttaacagacggtgatctaactgttcttccgtaagtgccggctttaaatctataaacatagaaagttctccggccgtaagagacggtttgatagctgcactcgccgataaaagcagcggcccgctgacaccaaagtgtgtaaacagcatctcgccaaactcctgatacagcagtttttttccatttaaaatgcgtacttccacattttttaatgaaagtccctgcatctgccggacatagtcttcttttgcgagaaacggtaccagtgacggccggatgtccgtgacggtatgtcctgcttcttttgcaaaacggtaaccatcccctgtagagccggtcgtctgataggaaaatccacctgtcgcaatgatcactgcatctgccggcattgtggtttcatctgtcagctttacgcctgtgacaatgttttccggcgcatcttctccggatgattccataagcagactttgtacctgtgtatgcagcattacttttacttttttctctttcagcactttctgcaatgttgcgatcacatccgaggaatgatccgaaacaggaaatacccggttgccacgctctgtttttgtcctcagtccgtttctctcaaaaaaatcaatgactctttgattgtcatacgaataaaaggcgctatataagaactttgcattggtcataacatttgcaaagagattatccatatctcccgcattggtaatattgcatcgtccctttccagtaatgaaaagtttttttccaagtttttcattcttttcaagcagaataacctgactgccggtttccgctgcggcgatcgcagcaaacattccagccggtcccccgcctattacaatgattttattcatgaaaatcgctgtctcctatttttgcataacgcatttttatggaatcgtcaatcgcattgatctcatcattttcatagacctgatactcatcccagattccttctaacatttctaatgtcttcgcaacatctctctgttttttcatacagagtgccacgatcagggcattgatcacgctgagtggtgcaaccagtgaatccacaatagacgccatatcactgtctgcgatcagattacaggacgaatacaaattcatcggtgaatgcacactgtctgttaatgtaatcacttttgcactgcggttgttggcaaactccatagcctttaacgtccgcatggaatatctcggaaaactgattccgataattacatcttccttaccaatacgaaccatttgttcaaaaatttcactggaactgctcgtctgtatcagacgtacattttcaaacatcaaagtaaaataaaatgccataaacgacgcaagcggcgcacagcttctgattccaataatataaatatgtttcgcattcaaaatggtatctactgccatctcaaatgctgcctgatctattttttccaatgtgctgttgattttttccgcatctgactttaaaacagattctaaaatttttgactggctgatcctgccataagtaacttccatacgctgaatggagtttaatttgttgcgtaccagttcttctaaggcactctgaaattcaggatatccccggtatccaagatgcatggcaaagcgcacaaccgtggattcgctgactccgaccacctcacctaattttgccgccgtcaaaaatactgccttatcatagttatctgtgatataggtggcaagcagtttctgtcccttgctcaatttactgtatgactcgttgatccgattactcaaatcattcttactgcccataacccctcgttcctgtcattttatgacaccgtctgcaatttatgatgtgcctctgcacaccaacatttctattatatcaaaacttttcctttttgtcagctttgaatcattttcattctgtaaaattcaccttttcgtgccatcagctcctcaaacgtaccatattccacacaatgtccgtccgcaagaacggcaatcttatctgcatcacgaattgttgacagccggtgtgccacaataaatgtcgttctccccttcgtcagattttccaaagcttcctgtatcagtttttcagaaatactgtctaaagccgacgtagcctcatcgagcacgatcacctccggatcacggatcagtgctcgcgcaatcgcaatgcgctgtctttgtccaccggaaagttttcctccatgttctcctaccatggtatcaaccccatttggaaggctctccatcagatccgtaagatttgccgcctttatgacacgttctaattcttcgtccgaaacatgttcgtttccgtaagtaatgttttcacgtatagtccctgaaaataatatggatgtctgtggtacaacggcaagatgttttctgtatgtacgcagatctatttccctcatatcattaccatctaaaaggaccttccctccgtccgccaaatgaaagccgatcacaagatttaacacagtcgattttcctgcacctgactccccgactaatgcgatcgtctccccctgttttacatgcaggttcaggtgatttaacaccggtttgtcactgtttttataatgaaaggaaacatcttcaaaatcaaaggtgccagttacgtcctctaactgctttttcccctcattctgctccacatcctctgagaggagcacctcaccaatggaattgacagattcaatgcctttcgcgattgtcggaagcaatgtaacgattgcagacacctgatttaccaccgttgcaaaataactctggtaaagtgtgatatcccccgccataatgcgtccacgcaacgcaagatagccggtaaatgccagacagacgacctgaaacacctggaataccgcccatccgactgaaccaaataatgcctgtaccagatccagtttatatcccttttccgccactgtaaaaagctgtccgctcatcttatgtacttcttcgtcctccaatgcgtgtgcccttgtcaccggaacaagttccaccatttccatcacacgagcggacgtttcttccatttcttttcgaaattccgtatttctttttttcatgaccgagcggaacgaaaccatcgtgattgccgcaaccggagttgtcaacagaaaaaatacaaaaacgatcttactttttgatgctgtgaccaccagcgcaaccccgatattcagtgcaatatttaaaatgcttaagaacatctgtgtggaaagtgtctccaccgcctccacatcacgcataatcttagactgcagccttccagactgtgtctccacatggtaggcgatcgacaactgctgaagtttccggatcaatgccttacgaagtcctgtttctgcgtaacgtgttgcaaggcttttatatgatgtatacagataattcattggtatattaagtgtgatcaaaccaatctcaagggctgcactgatccagatatttctcacggtatcaggattcttctgtgtcacatcattgatgatatttgcagttatgattggaagtacccacacacatgcatgctttataaaaaaacagataactgccataacaaatttatgataatttcctttgtacagtgctatcagaatccgtatcggatgacctttatatctgcgataactttctataaaccagttttctgtatctatgccatttttcggcgacgttttccgttcaaaattttccattttcttatatcctttatcatttataggatgattctaattcttttctttgtaaaaagcaatatttcagcaaaacaaaaaatgccacagcagcatcctaaaatactgccgtggcatttcatcaatcatattctaattataccggatatgcaccattctttgtatctgcaattgttgcatctacttttttctgctgtgcttcacggtatttgaagaactcagttgcaacctgtgggaacaatgcgtaagataatacatcttcatcctgctgtttccactgtttcatctcagcttcaatcttgtcaagctctggctctaacagatctgccggacgacaggtaattgcattcttcttctcatcgcctaatactttgtcaacaacttccggattgaacggttttacagtctgaccgtattttccaaggagaacatctttcgtctctttggtcgctactttgtaacgctcacccattaatacgttgaatacagcctgtgtaccaacgatctgtgaggaaggtgtaacaagcggcggctcaccaagatctttacgaacacgcggtacttctgcaagtacttcctcgtatttgtcctctttcccctgctcttttaactgggagatcaggttggataacataccacccggtacctgatataataaagtcttgatgtttacacctaatactttcgggttcatcagaccactctctaatgcttcctctctcatcgggcggaagtaatcagcgatctcagcaagtttgttctggtctaaaccggtatcaaactctgttcccttgaatgcctctaccataacttctgtagccggctgggatgttccaagtgcgaacggagacattgcagtatcgatgatatcacatcctgcctctactgctttcaaatatgtcatggaagcaacacctgatgtatagtgtgtatgtaactctaacgggatatcgattacttctttgatcgcacgtactaactcgtccgctttctgtggaactaaaagtcctgccatatctttgatacatacagaatcagcgcccatatcctctactctttttgccatatctgtccagtaatctaaagtataagcatcaccgagtgtgtaagataaagcaacctgtgcatgtcctttttctttgttacatgcgcttactgctgtctgaagattgcgaagatcattcagacagtcaaaaatacggatgatatcaattccgtttgcgatggatttctgtacgaaatactctactacatcatcagcatatggacggtatcctaagatattctgtccacggaataacatctgtaatttcgtatttttaaaaccatctcttaatttacgaagacgatcccatggatcctcttttaagaaacgaagggatgcatcgaaagtagcgcctccccagcactcaacagcatagtatccaaccttgtccatcttatctacgattggaagcatctgctctgttgtcattcttgttgcgatcagagactgatgtgcatcacgcagtactgtctctgttatttttaaaggttttttaacaacttcagccattttttcctccttatacagcgaacctgtttttgttctgccgtctgattaaattccaaagattgccatgaatacaccggctgctactgctgtaccgataacaccggcaacgtttggtcccattgcatgcataagtaaaaagttcgtaggatcttcctctgcaccaactttctgtgatacacgcgcagccataggaactgcggatacaccggcagaaccgatgagtgggttgatcttgccttttgtaatgaagcaaagtaatttaccgaacaatactccggctgctgtaccaaacataaatgcaatcagtccaagtgcaacgatctttaaagttgttgcatttaagaaagcctctgcacttgtggatgcaccaacggatgtaccaagtaagataactacgatatacatcaatgcattagatgctgtctcagataactgacgaaccacaccacactcacggaacaggttaccaagcattaacataccaacgagcggggctgttgtcggaaggatcagacatacaacaacggttaccacgattgggaataagattttctcaagtttggataccggacgtaagttctgcatcttgatcgcacgttctttttttgttgtaaataacttcataattggcggctgaatgatcggcaccagtgccatgtaagaatatgctgctacagcgatcggtcccataaggccggactgtccaagttttcctgcaaggaaaatggaagtaggaccatctgcaccaccgatgatagaaacggctgctgctgctttatcattgaatcccatcaggattgcaaggaaatatgcgccgaaaataccaaactgtgctgctgctcctaaaaggaagctgatcgggtttgcgatcagaggtccaaaatcggtcatcgcaccaacgccaaggaaaataagggatggcaggattgaccattcatctaaggtataaaaataatggaataaaccaccgacaccgttactcatctgttccggagttgcaaagatatccggataaatgtttaccagaagcataccaaatgcgatcggaacgagtaacaacggttcaaacccttttgcaatcgccagatacaggaaaatacatgcaactaagatcattacgaaatttccccatgtcaggttaaaaaaggcagtctgatgaaggaggttgcccattgtctcagtaaaataactcattgttatcctcctaaaattagttgtttaaagttgccagtaatgcacctgcttctaccatgtcaccaacacttacgttgatgcttgctactgtaccatcttcggtagcaacaaccggtgtctccattttcatgatttcaagaactaagattgtgtcacctttctttacagatgcgccaacagaagactcgatcttaaatacttttcctgctgcacctgcttcgatctttacgttacctgcgccacctgccggtgctgctgccttcggtgctgctgccggagccggagctgctgcacgtctcggtgctgctgccggtgcacttacagcaccattctcttctacagtaacatcataaacatttccatttacggtaattgtatagcttttcattgaatcatcctcctgtgatcattacttttttacgacatatatttattataacttgtctgcttcgcctatcttctatggatagaacgtactacgaatccatctgctgatgttccttctgccgctgcgattgctgcagaaataactgcaaccagttctaaatcatcagtaagctgggatgtctcctcacgctgctcgatctgttctacaaccggatctgccacatctttcttcgcaccagcatttgcttttttgttctgtaaatacggaatcactttaaagcagctgatgatcagactgatcaggataagaactacaaatacggttcccattcccatcaatgtattcataccggctttttccattttctcgccaagtgaatacacaagatctgcacttgcatctgtaagttccggtgcttctgtctcgtaattgtattcatatacataagaaacaactacatctctgtctgagaaatgtaaaacctggtctgcagtcacagtcttctgtgcttttgtcacagtaagatctccaagtccctgataggaacccagatctgaaactgtttcaccccaggatgtcagtaagtgggcaaatgcatccattccgttggagtcataatattctgcaccactctgtatatcttcatctgaaaacgaaacaagcgcagatactgtctgctccatgttatcctggatatcagaataactcataccaaaataatcaacgctcttaggatccgttccacatgctgtcattgccagaaccataaagcaaagacaaagcataagagataattttttcttcataacttcacctttctattttgttccatgtttcttgtccggtacacctgcacattttgtgtataataattcaaatgcatctacaaggtattttctggtgtctgccggatctaaaataagatctacataaccacgtcttgctgcagtcataacacttgactgtaatgcatcatattcttttgcttttgctgcgagttcatctgcagatgcatctgcgtacatgatctttgctgcaagctcgccatccatcataccgatctttgcatcttcccatgcatatgtaaagtctgctccgattgctttggagttcattgtcacataagcgcttccgattgcatttccggtgatcaggtttactttcgggcaggttgcatcagcgaatgccattgtcatgcgtgcaagtgcttttgcaagtcctttttctgcacagacagtagctgcataaccttttacgtttgttaaagacaataccgggatctcgaacgcatcacagaagttaacgaactctgctgccttgttgcatcctcttgctgtcagagctccggagaactcctctgcttttttgccctcttcatcgtaaacttctgagcagtttgcaacagcgccgactgtcattccgtttaaccggataaatccggttaccatatcttttgcatagtttttctttgtttcaaagaatacatgtccgtctgagatctcacttaataaatatcttggatcgcctttcatggctgccatgttctcacatgcacggtttaaatcatcctgacactcagatgtgtatacatctccttcattatttaaaggaaggacacttactaactcgcggatctctgcaatgatctcatcctctgttccaacagcatcgatacaaccgtttttctcactctggaactctgcggaagaagtatcgcatttttcaatacggttaccctcgatcgcattcggggaattgatgaacatttttcctttgctctccataaatgcgaaatcagataatgcaggaactactgcaagtccaccgccacagcttccgaaaatagcggaaatctgcggaacaacgccggatgctgcaacctcctttgcgtagatctcaccaaatccgtttaacgcatccacagattcctgtaaacgcattccggcgcaatcgataaatccgatcaccggtgctcccattttcattgccatgtcatatacggctgcaatcttctttgcatgcatctctccgatagtaccgtttaatacagctgcattctggctgtatacaaataccagattgccatccaccagaccatgtccggtaattacaccatcggacggtgtatctgtgtctgcaagattaaagtctgtatttcttgcggttacgagagaaccgatttccatgaaactgttctcatcgactaacttggtaatacgctgcattgccaagctatcattactactattcatcctttttgccctccatctataaagtttgttaccacatcttttgacatggtacatagtgaataatgtaaaaatataacaaattccgctaggataaattatagatggtcagtgacaaattttcaagagaattgttaattttttgacagtttttttttgcatacaaggaatttgggacttttacattggaaataattctgctgttttttttacacaccagcaaaaatcgattctttttaccgtattcttcactgtgaccacacgttttgccagaacctcatctcccagaaggtatgttatctcaccgataaaatctccttccgttaccggtgcataaagtttccgggataattgatactctatgtgtacttcctggtctttttcgatcaatagttccacattttctttcaccggcgcaacttcaagttctgtcgttacctcttcgccgatctttgtgccctgtccgtccaccacctgtaccggagcatattcccctgcgtccagttcaatctcatccagacttattttccggaaccgggaaattccatactgcataagtttttttgtatctgcccacttatatgttttattattcggccacccgcaggcaagcagtgcaacgataaaagttctgtcatcacgttttaatgccccgacataacaatatcccgcattaccggtaaaaccggtcttgcctgacaatgccccgtccatcatctgcaaaaatgcattatgattacagcaggtgtaactgtttttaccatctatatcagaaaactgatactgtccttcccttgtgattgtaagaaattgctctgccatttctgatgttttgatgcagtaccgcatgatcaaagaaagatctgccgctgttgtgtgatgaaagccattttcatttttggcatccagtccgttcggtgtgataaaataactgtcctcacagccgatctcctctgctttatcgttcataagttttgcaaaatcacccgtcgtgcctgcaatgtgttctgcaatcgccacagcgcagtcattataagattccaacatcagtccgtacagcagatctttcagataaaacttctgcccctcccgcatacccagatgaactttcggctgtgacgctgcaagcgtactcacggtcacttcgctgtccaggtcgcagttttccagtgcaatgatacatgtcagtattttggtcgtactggcattcgccatcgcctggtgcccgtttttttcatacaggatacgcccggaatccgcatccataagcacagctgcttttgcatacagggaattttgatccggcttttctgtcacttcctccatccgcacattttctttttgatcaaaagcctccacgatctgtatcccatatcctgttaagatcacagtgacaaggatccatgccagcagttttttccacatacaccagactccaaaaaagcatttcatcaatccttatgtatataatacgcaaaaaatgctcattttttgtgaaaaaaaagcatacgaaaccagatcagatatccagtttcatatgcatttccgcttccgcttcctgtttgaattcttctacctggaccggacttaacacgggaagttcatcgattgactgaacgccaaaactccttaagaattcctccgttgtgccaaaaagcagcgggcgtcccggcgcatccagccttccaagttcacataccagattgtactccaccagcttgtttaccgcatgatcgcaggaaacacctctgatcttttcaatttccgcctttgtaatcggctgcttgtaggcaatgatcgaaagggtttcaagcagaacgtcggtaagcacatgctttttcggctgttttgcgattttcaccagatattcatacatttcgcccttcgtacacatctgataagaaccgtccagttccatgatcttaacgccgacgccatcatcctcatagcgctgcatcagatgttctatgatcttttttgtccgttctgtatcaagttccagtgtttttgctatacgctctaattccacagactctcccattgtaaacaggatcgcctcaacgattgcctcatattttttttcttccataccaaccctctattccggtgtgtaaaaattccacacagatcccatttcatttctgctgtcacacagctaggccgcaatttttgattcaatttttatatcatcaaacgtgtattcctgggaaacaacgatctttcccatcttcatcagctctaatattgccagaaatgtcacaaccacttccattttcccggactgtgcttctaaaagactccgaaacgaaaaatgtccgtgatgcagactgtattcttccacatatgtcatcttatcagaaagtgacacttcctctttctcgattcttccaaacttcgaacggaccggatcgatcttatccgcctgtttctttatgatggactgaaaaatatcattcagcctcgcaagtgttaccccggacatcagttcattcacatcaaccggttcttcatatgcaagaacttcgggcgggattgtcggtgctttaaaccatactttttccgcatcaatctgacggtccctgagttcatatgccatacatttatacattttatattccaacagctgctgcacaagttccgctctcggatcttcttcttcatcatcctcgctttcttttgcagggagcagcatttttgatttgatatcaagcagtgtcgccgccatcacgagaaattcgctcatcacatttaagtcctgtctgcgcatttcggcaatatattccatatactggtttgtgatctccacgattggaatatcatatatattgactttatttttttctaacagatgtaaaagcagatctaacggcccctcaaacacctgaagttttacagttaattccatctatgtcataccctctcattccacaaatattgattttaccgtggattcccgcaaaattcaagatttttatgcataatgtacatccttcgcatctaaaataaattataacagaaccctacggagggcatattcttgaaattcatggtttccattctgctcggtctcaatctccttgtgcagggcacggtacttcctgcatcttcctgtttcattccgaatgtaaccatccccctgtctcctgctgcccagacagatactgcacctgctgcagacttaaatatctccgcaccaagcgccattttgatggaggcttccaccggtgccgtcgtctacgaaaaaaattcccacgaggcaaggcatccggcaagtgtcaccaagattatgacgctgcttctgatttttgatgcactctcatccaaacagatttccttagatgacacggtgaccgtctccgaatatgcagcaagcatgggcggttctcaggtgtttttagaaccgggtgaaacccagacagtcgaaacgatgatcaaatgtatcagtgttgcgagcgccaatgacgcctgtgttgccatggcagaacatgttgccggttccgaatcagaatttgtccgcatgatgaacgaacgcgcaaaaggactcggtatgaatgacaccaatttcgtcaactgctgtggtttagatgccgacggacatatgaccagcgccaatgacattgcactgatgtcgcgcgaactgatcacaaaatacccgaaaatccatgattactgcacaatctggatggaaaatatcacccacactaccgcaaaaggttcctcggagttcggtctgacaaacaccaataagctgatcaaacattaccagtatgccaccggcttaaaaaccggatttaccaacactgccatgtactgtatttccgcaaccgccaaaaaagatgatatggaactgatcgccgtcatcatgggggctcctgatatcaagtcacgctctgcggatgccacgactcttttgaattatgggtttgggaaatgcaggatttactgtgacagccacgaagataagttagacgatctcccggttgaaaaaggccttgcggattctgtaggcatcatttaccaaagaccttttcaatacatgacaacagacggaagtgatcttaccggcattaccaaaagcatcgaactgccggaaaatgtgacagcaccagtaaaaaaaggaaacactgccgggaaggcggtctattctctaaatggaacgccgatcggcagtgtcaatattgtatatgcggatacagtcgatgctgcagattataaagattatttttgccgcaccctgttatattttgttccttaaaaatacagcgtccggtgtatcactgatttgatgtcatgaaacattctgttattacatatcactgatctgatggtgcggaacatttgttctcatattataacaacggtgcaaacagacgcatcaggctctgaaccatacgtaccggaagtcttcgtctgcggcagaatgaaacatccatctcctccgactcttcaaatgtcctgaggcagtcttcctttacctgcatgactgccttagaccggtacataaatacaccacattcaaagtgtaaaaacagactccggtagtcaaggtttacactgccgaccgtcgcgatctcatcgtcacagacaaaacattttgcatggataaatcccggtgtatactgaaaaatcttcacaccattctttaaaagcggttcataataagactgtgttaaaagatatactgcctttttatccggcacacccggtgtcacgatccttacatccacaccgctctttgctgcatttgagagacagatcagcatttcgtgatcgatgatcagatatggtgtaaaaatatacacatagtttttcgcacggtttatgatattcagataaatattttctccgacgttttcattatcgagcggactgtcaccatacggctgtacaaagccatcggaggtaaattctttctccctgtaaacagacggcaggaatctgctgtaatcttccgtggaacggttgatataattccacatttccagaaacattgccgtaaggctccagactgcctctccctcaatccgcactccggtatccttccagtatccaaaccttttgactttattgatatattcatcggcaagattgataccgcctgtaaatccaatatacccatccaccacaaaaattttacggtgatcgcggttgttcatcaccacagagatcagtggtttaaacggattgaatgtcacacagggaatccctctctcctgcagctttttataatatccaaaagaaatagaattgatgctgccgacatcatcatagataaagcgcacatccactccggcctttgccttttcctcaagaatatcaaggatcgtattgaacatatatccttcttcaatgataaaatactcgagaaatataaaatgttttgcaccgcgcagtgcctctaacatatccgggaacatttcttccccgcagctgtaatattttgtctgcgtgttctgatataatggaaatcccgcccatttatcaatataagatgactgcagatatgctgaccggctttctttttctaagcctttctcctctgcgctatctctctgaaacaatgcttccacctgacggttgacagcatccattctctctcttgtatgtttggtcagaccggatcttccaaataagaaatataccataagtccaaaaatcggcgacaataagatcaaaaacgtccacgagagtttattcgccggatttgtccatttattgacgattacaagcacaacaatgattgctatcacacgcacaagcaaattgacatacgtaaacttgtaactgagctgccacaatacgacacacagccataacacctgtaaaatgattgccatggcaaccacaaaaaatcttccaaatatgagatgtaatattttcttcatacaaatctccattctccctgcacgcttttcaatgaaagcaacgttttcatctgcacaagtttgtgccacagtacaaatatgtgcttattgtaataattttcctctcaaaagtcaacgcacgagatgatccacatgtatcatcccccatccgatcctgccaagctgcgcacttctcggatatgctctctcataaaggcgcagcttcatttctgccggagtaaatgatggatacttctcaaatgcaagggcaagcgcccctgagacaaccggtgctgccatggaagttccgctttttacctgatatccgcttttatccttgctgcagcttgtaataccggttccgggtgcgaggatttccggctttacgatgcagcatgcagtcggccccctgccgctgtatccggtttttaaaacttttctcccacggtcataggtatcatcatcactgcttccgaccgtcagtacttttcttgaaatacccggaatcgtcaccgtattttcttttggtccgttatttcctgcagcggcaacgaccatgatccctgcatcccacaattcatcgatcgcatataaaagctttctctgctcctccacacctgcgcccggtaacattcctaccgatatatttaatatcttaatatgataacgttccctgttctctttgacccacatcactgcatcaagtacttttttcgtatttccatttccattttcatctaaaacctttaacatgataatcctgcattttggtgcaactccactgtatatccgaaccttatgtgcagtatctttcagatactgctcagacatttttccgtttcccgcaataatccccgaaacatgggtgccgtgaccattatcatcatacatttcctttctcccataacaaaaatcatgaaaatatatgattctgtcctcaaaatccggatgtgcaacaataccggtatccatcactgcaacggtaacattctgtccgctaagtcctgatctgtatgcataatccgtgtgaatcatcttcttcacccgatccatagtctctcccattctgtcaaagaacttccatattattatatgaagaaatttattttctgctaaaaatgataaaaaaatgttaaatttttctgaatattcagaagaatgtttgacacttggcatgattttccttataataaataatagttaattagtgaactattttggttcgctttaaaatcaaaaaagaaagtagtgtgatgccatcttgaacaaaaaactcaaagaaaaatttgacgaatccgtaaatgcagtcctgccgatcacggtgatcgtgctcctgctttccatttttgttgttcccatggaaaccggaacgatcgccctgttcttagtcggtgcatttatgctgatcatcggcatggcttttttccagctcggtgcagaaactgccatgacacctctcggcgaaggcgttggttcttccattatgaaaacaagaaagcttcctgttttaatcggcgtatgctttctgatgggtattatcataaccctcgcagaacccgatcttcaggttcttgcaaatcaggttccttctattccgaacaataccctgatctttacggttgcacttggtgtcggcgtattcttagtgatcgccgtactccgtattctctttcggatcagtcttccagttcttttgtgcattttttatattgcactgttttttctttctttcgcggctcctgctgattttattgcagtcgcatttgactccggcggcgtgacgacaggtcccatgacagttccctttattatggcgatcggtgttggtctctccgcaaccagaaacgataaaaacggttcgagtgacagttttggtctgatttctttttgcagtgtaggtcctgttttaatggtccttctgcttggcattttttatcatccaactggtgccgcatacaatgagacaacaatcccggacgtaatcacgatgcaggacgtgatccgcgaatttgtacatatgataccggattatgcaaaagaggttctgctgtccatccttccggtaattttcgtatttctgatcttccagcttatttccagacgttatcacaagccacaggtgatcaaaatgatcatcggtttactctacacgatcatcggtctgatccttttcttaaccggtgtaaacgtcggatttgctcctgttggaagtcttcttggaagcagtcttgccggccagccgtggaaatggattttaatcccgatcggtgccttgatcggttactatatcgtaaaagcagagcctgcggtccaggtattaaaccgtcaggttgaggacgtcacaaacggctctatttccagagataccatgaatttaagcctgtcgatcggtgtatctgcctccgttgcacttgcattgcttcgtgttcttaccggtttaaacatttactggcttttaatcccgggatacctgattgcactgattctgacaagatttgtaccaaaagtatttgtcggcattgccttcgactccggcggtgttgcgagtggtcctatgacttccacttttctgctcccgcttgccatgggtgcatgtaccgcgatcggaggaaatgtagtcacagatgctttcggagttgttgcgatggttgccatggcaccacttattgcagttcaggtcatgggtgtctcctataatatgaaattaaagaaagcaagtacccctgccgccgccatcattggcattgacgacaatgaaattctggattttgaggaggatttttaacgatgcaggaacagaaaaaacgagaagcttaccgctgccttgtaattatcacagactcccatatcagagagcaattatgcgaatttttagcagattcccatataccggtctactatcagatgcatgggatcggcacagccagttcagaatggttagaattatgcggtcttggaagtatccagaaaagtatcacactctgttttattccaaacggacgcaaaaaaattctgctcgctgaaatgaatcaggcattgagccttcataaaaaaggaaccggtattgccgtcagcattcccatgaacggtatgcagggatttctatataaacttttaaacgagcacaccgcagaatcagacggcgaagaagttgaaaaggaagtgaaaaagatgagtgaaccaattacacatgctatgatacttgtaacaatcaatcagggatacagtgacgctgtcatgaacaccgcgcgcgctgccggtgcaaccggaggcacgatcttaaaaggtctgcgctgcagtcccggaaaatcggctgtcatcttcggcatcacgatccaggaagaacaggaaatcgtcgcaatcgttgtaccaaaagataaaaaaacagagatcatgcaggcgatcagctctgctcatggaatggactctcctgcccatggtgttgccttttccctgccagtggacggaattatgggattgtaatgccgatgaggccattctattgtcaggtattacaaaaaagaactgcacgttaataactatcattaacatacagttcttttttcaaatccatatatcttgtatatagattatttataatttttaaactatttgttttttcttatgcctctgccggaacatccttcatagagaagctgatgcgtcccatcttgtcttttccaaggcagacaacttttactttatctcctaatgtcaggacatcctccacacgattgatacgctctttggaaatcttggaaatatgaaccattccctctttacctggagcaaattcaacaaatgcgccaaattctttgatgcttacaacagtaccagtaaagatctgtccctctgcaaagtcagtggtgataatcttgatcatttcgattgctttgttcatcatctctgcgtctgtgccacatacagatacagcaccgtcatcggtaatgtcgatcttaacgcctgtgcggtcaatgatctcgttgatcgtctttcctctctgtccgactacatcaccgatcttgtccggattgatctggatctgaacgatcttcggtgcgaatgtgctgacttcttttctcggctcctcgattgcttttgacataacctcatccatgatgtagattcttgcctctctcgcacgtccgattgcttcctcaacgatcggtcttgtaagaccatggatcttgatatccatctggattgctgtgatacctttgtgtgtaccggttaccttaaagtccatatctccgaagaaatcctcaagaccctggatatccgtaagaacaaggtaatcatcatctgtgtcaccggtaacaagaccacaggaaatacctgcaaccattgcttttaacggaacacctgctgccattaaagacatacaggatgcacaggtggaagccatggaagtagatccatttgactcaaatgtctcggatacggcacggatcgcatatgggaactcctcctcagaaggaagtactgccataagtgctttctcagccagtgcaccgtgaccgatctcacggcgtcccggtccacgggaaacttttgtctcacctacagaatatgcagggaagttgtactgatggatatatctctttgttgtgatgttctcatctaatccgtcgatcttctgtacctcagaaagcggagctaatgtgacaacatcacagatctgtgtctgtccacgggtaaacattgcagaaccatgcactctaggaatcaggtcaacctcagctgcaagcggacggatctggttgattgcacggccatccggacgtttgtggtcttttaagatcatcttgcggacagtctttttctgatactggtaaacagcctcgccaagcactgccaaccactcttcgttatctgcgaatgcctcagcaagtttatctgtgatctcacggatgttctcttcacgtttctgtttctcatcggtaaatacagcttcttccatctgctccggtgttacgatctctttgattgcagcaaacatctcttccggaattgcacagcttgtatactcatgttttggcttaccaacctcttctacgatatggttgatgaaagcgatgattgtctggttcacatcatgacatttatagattgcctcgatcatcttctcttccggaatctcatttgcaccagcttcgatcatgatgactttctcagcggtagatgcaacggtaagctgtaaatcaccggtatcccatactttctgggaaggattgataataaactcgccatctaccatacccatctgtgtcatggcacaaggacctgcaaacgggatatcagaaatggtaactgcaagtgcggaaccgatcattgcaacaacttccggacggcactccgggtcaacagacataaccatgttgttgatggtaacgtcgttgcggtaatccttcgggaataacggacgcatcgggcggtcgataacacgggaagtaaggattgcattctcggatgccttaccttctctcttgttaaatccaccagggatttttccgactgcatacattttctcttcgtactcaacgctgagcgggaagaaatcgactccgtctctcggcttgtccgatgcggtagcagtagataaaactgttgtctcaccgtattttaataatgcggctccgtttgcctgggcacatactctgccgatatctacggtcagtgttctgcctgcaagttccattgaaaaacttttatacatgcgttttctccttttctctgtggagacagaagcaccgaaactactgaaaaatccacgacctctcatacatttttcagtggtctcggaaatatacttctgcctttggcaaagaacctgttttcacaggattctttcttattttaactgaaaatcgagtggagtaagtctccactcgataaaaccgtatgaaaacagattccatacggtatccatacatgccagcctccatgcggaagcggctctgtatggagaagatcttattttctaagacctaagcgctcaattaaggaacgatatctttcgatatcaactttctttaagtatgccagtaaaccacgtctctgaccaaccatctttaaaagaccacgtcttgaatgatagtcgtttttgttctcagcaagatgagcatttaactcctcgatacgtgctgttaagatagcgatctgaacttccggtgaacctgtatctcccggtgttctgccatactctgcgataattgcctgtttcttttcctttgcgatcatgttatgatcctccttttcttattaaacgcccgttccggctgtgccgggatatgatactcagtaaaaggtcggagtgtccatctaccgaatatgggctaaactcatactccgctattatagcatgggttgtttctgttgtaaatgcctaaatttaattattgatcacacggactactttgaccggtgttctatagtatgctcctgagatcttgataccggacttcggtgaacttgcatgtaccacacggccgcctccaatataaatagccacatgattgatactgcttccgttgccgtagaagaaaagatctcccggctgtgcatccgatgcggaaatctttgtaccgcagtttgcctgtgctcttgaagaatgtggaagtgaaatgccatagttggcaaatacgctcatgacaaatccagaacagtccgcccctcttgtcagactggttccaccccatacatacgggtttccgacaaactgtgttgcataggaaacaagggatacacggacatccgatataccctgtccataacggacttctgtcatagtctgtgccttcggaagttcggttgcaatgctgacatagtctgaagagacatatccctcatcactgtcgacattgatctttacccagccgtcaaggacttcaagaacctcaagttcctcaccctccggcatcatggtgatgacatggctgtctgtgtttgcctcgtcacgaacataaagcgtggtcgtcgttacggttgcaactgtctgctttacttcctgtgcctttgcgatcgctgcttcaccggtcataagatattctgattttacatatccttttacttttccggactcgatctgtgtccagtcaccatctgttccgataatctcacatcctgcattgtttggcagctttccaacaatctctgcctctgttcccggaacttcacggacattgatattgccatctgcctgtgcgattcccagatttgtgtatccaaatgcactggctgcctctgcaagcgcctgtgcctgtttttcttcctctgtttgtgtctcatcttcctgaccggatgcagtcatatcacggtcggattctgaaacactgaccatatctgctgcggtaacagaaaggtaatccgacatcacatcagtaacaccggatgcaagatccgtaccctgttttgtataattttccatctgttctgccaatgtggaagacacccccgcagacacttcatgtatctgggaatctgtgctctctgccattacttcctgtgtgtctttcacacccggctttccgtcaatataagctgctgaaaatacaagagaaccggctgcaagaagtccggctgccttaacccattttgctttcatatccgtacctttccaaagaatcctgaatacttcgtttatcaataccgctcaagtatagcagtcattttttacaatgtcaacatatttatgtaacatttccgtaatatttaggattcatttttctcgaaccatgccctcgcatatgcaatattattctgcatttcctcttttaaagcctcgatggatgaaaatttccgttcctcccggattcttgtcaagaactcgaccgtcactactttgccgtaaagatccccggcaaaatccagaagatgtgtctcaacaccgaccggattttttccttcaatcgtcggtttcaccccaacgtttgtaacgccacggcagctccggtcgccaagccgcacttctgtcacatagacaccactctccggaagcagtttttcctccggcggaatctggttgatcgtcgggattccaagtttcgtgctgcctaaatgtcttccgtgaaggatctcccctgtcacaaaatagtgataccctaacagatgatttgccttctcaatattgccctttgcaatctcttcccggacaaatgtgctgctgatatctctcttatcttcctgcattttatcgatcacaagcacttcatagccatacttgtccgataaatctttcaacatgtgataatcgcccctgcgattgtgcccaaagtgaaaatcagaaccaaccacaaaacactttacatgaagctgatgcacgatcttggcaatgaaatcttccggttccatgcacatgatctcttttgtaaacggacactcgaccagatagtcgatcccaatctgctcaaagatatgcattttttcttcattggttgttaaaactttcgcctcaacctgttccacacttttccgtggtggaatattaaatgtgaatatgaccgctgcaagtcccgcttcctttttggatgccagatgttccatcaggagttcatggcctctgtgtatcccgtcaaattttccaagtgaaagtacggttgactcttcaatataaaattcggttgtgtttttcagatatttcatgcttccataaacaattttaccggtttataatccccgtgtatctcggagtactcatatatcccgataaaacgcccttcttcatcataaatacgaaccttctgctgttcccagtctttctgataagaaacaaacatgtcttttttcatccggtttccattatataacagtttgttccattctttgcagatcaccgcttttttatactgtaaaaatacggaatcaaccgcataaataaaatcaaacatctctgcgttccactgttctgacggtgtctgtcctgccgctttttgtacacgttcttcgatctcggagaggcgaagcgcatcctgtacacaaaattcagatacctttgtgcgcagcaaggattccatacatgctccacaggaaagtttctcaccgatgtcctgacataatgtacggatataagttccctttgagcagcgcacacgcatacagacccggggcagttccattttaataatctcaatggaatagagctgaaccggtcttgcctgacgttccaccgtcacaccggcccttgcgagatcgcacagtttctttccgttcacttttaatgcagaatacatcggcggaacctgcatgtattcccctgtaaaagaaagaactgcctcttttacctgctcttccgttacttctaccagatgttcctctaaaacagttcccgtggtatcctgcgtgtctgtcacctttccaagcagcatcaccgcaacgtattctttgtttttgtccgtcaaaaggtcgcagacttttgtcgctttaccaagacacacaggaagcactccctccgcatccggatcgagtgtccctgtgtgtccgattttctttgtttttaaaatacctcttagttttgcgaccacatcaaaggatgtatatcctttttctttgtatacattgataattccgttaatcataaattttcccgtctcatgtacagccgtcattttctgcaatctgaaaatttcaggctgcctgtatcgttaatctgtgatctgttctctgatatcttcaataatttcattcagccgtttttccggatctcccgccacggaaaaacctgctgccctgacatgtccgccaccgccatattttgctgcgatctttgcaacatccacataacttgcagaacgggtgctgactttataattttcttcatctgtctggtataaaaagactgctgcttccacgtcctttgtcacgcgaagctggctgacgatcccgtctaaatgtttcggaagaacattgtattctctcatttcctctgcagttatgatactcgagatgcattttccatccagatgcagcttactttttaccagcgcaagtcccatgatacggttctgctcataggtttttgtaaaaaacgtctgatccacgatcttcgggaaatcaatgcccattcccatcagaacacctgctgcctccatcgttttttccgatgtgcaggaatactggaacacaccggtatcatggatgattccggtataaatgcattctgcgatctctttggtcagacgttctctcgggatcagttcaaataccagttccgacgcagaactcgcctgcggaaaaatatagttttcatccgcaaaactctggttactgatatgatgatcgatacacgctgttttttttgcatgctcaaaatattttgccgcgtctccaagtctgcccagatccccgcagtcctgtgcgataaacagatcaaactctttatctgcagtgcagtcgcttatgatcttatccgcatttttcataaatttgaaaatattgggtatcggctgcagatacaggctgacttcgatctgcgggtaatatgtcgtaatatagttataggttgcaaggcaggagcctacgcagtccccatccggtctgatatgacctgcaatggcagctgtttttactcccgcgaaaagttcatcgagacttttcatgttctcctccatccccaaatatacgcttttcgtttgtcttattcctctgcgtcatcttcgcttttgatatcttttgtgacctcgtcgatcattttagacatctttacaccatattcaatcgactggtctaacacgaaacggatctccggtgtattgcgcagatttactgttttcgcaagtttgctgcggataaatccctccgcgctctttaaccctgcaagtgtttttgcctgggattcttcatctcctaaaacactgatatatgctttacatgtttttaaatccggtgcaacctccactgccacaacgcttgtcagcgggttgatccgcgggtctttgatctccccgcggatgatattggaaagttcgcgctgcacctctccattgatcctggtatttttaatactgttttttctcattttataacctcttagcgcggtacctcaaccattgtatacgcttctacgatatctaattcctggaaatcaccgaaaccttcaaatacaagaccgcactcaaatcctgcttttacttctttgacatcatctttaaatctctttaaggaagctaaatcaccctcaaagatctgttcgccctcgcgggaaatacgaactttacatcctctctggaacataccgtcaagcacataagaacctgcgatattgccgacgccggaagccttgaagatctgacggatctctgcatgacctaatactttctcttcgtataccgggtctaacattcccttcatggctgcctctacatcctcaattgcattgtagatgactttgtagagacggatatctacgttttctttatctgcagtaagttttgcagtcggatccggacggacgttaaatccgatgatgatcgcatttgatgcagatgcaaggctgacatcagactcgttgatcgcaccaacaccaccatggatgacttttacaacaacttcttcgttcgacagttttacaagactctgttttactgcctccacggaaccctgtacatcggcttttacgatgatatcgagttctttgacatttccggactggatctgtgaaaacagatcgtctaaggacatcttcgcttttgtatcttcgatcagacggttcttgccctcggaaatataggtctcagcaaatgctctcgcctctttttctgtatccatggcaacgaatgtctcgcccgcttccggtacagaggataaacctaagatctctaccggcatggaaggaccagcttctttgacacgtcttccctgatcatcaatcattgcacggactttaccatagcagcttccgcatgctaccggctggccaacttttaaagtacctttctgtactaaaacagtggcaacggcaccgcggcccttatcaagctgtgcctcaatgacaagacctcttgcattacgtttcggatttgcttttaactcaagtacttctgctgttaaaaggatcatctcaagcaggttgtcaataccctcttttgtatgtgcggataccggacagaagatcgtgcttccaccccagtcttccgggataagttcatactcggataactcctgttttacacgctcgatatttgcactcggcttatcgatcttgttgatcgcaacgatgatctcaacacctgctgcttttgcatggttgattgcctctacggtctgtggcattacaccatcgtctgctgcaacgactaagatcgcaatatcggtagaatttgcaccacgcatacgcattgcagtaaatgcctcatgtcctggtgtatctaagaatgtgatcttctgaccattgatggataccacggatgcaccgatgtgctgtgtgataccgcctgcctctctgtctgtcacacgggtagaacggattgcatccagcaaggatgttttaccatggtcaacgtggcccataacacagacaaccggtggacgtgctactaaagtatcttccggatcttcttcctcttttaagagttcggcgatcacatcgactttttcttccggctcacagatgcagttaaactctaatgcgatttcttctgcctgctcgtaatctacttcctggtttaccgtaaccatcgttccttttaagaacagtttctttacgataacggatggctgtactttcatcttgtcagctaactctctgatcgtaagtttctccggtaataccagtgtgcggatcacatcctcttccggctgctgttttggctgctgctgaggtttcttcttgccaccgttcttctcaagattgataaagcgctcctgtttctttccgccaagtgcatcgtaatcgttgcgctgtcttgcgtttttgtttctgtccttatcgcgctctctggattcttttcctcttaactcctccggtgctgctgcagctgcctctttattgaagcggtcgatctcacggtcaagtctgccgccaccattatttccaccacggaagccattgtttctgttgttatttctgtcgccctgaccctgtcccggtctgccattgttctggtatggacgctgtccatcgtttcttccgtttctgtcaccgtacgggcgctgtggtctgtcaccattgtttctctggtttcttccatctccctgcggacggcgctgaccattattgttacggtcgcgtctgtcattattattcccctgacggcggtcattattctgcggacggtactccggattctgtgcatagacattttctcttggagtctgtacctgtactttttcaaccgttttcttcggctcttccgctgccggttttgcctctctctgtgccttcagctctgctgcttttgccgctgcaagatgctctgcctcttccgctgcttttgctgcctccgggttaattgcacgttcaaatgcttttcttacatcataaccggatgtcggtcttgcctgcgcattgccgcggtttggattctgtccctgtggacggcggtcgccattcccctggcgtctgtcaccatttccagaacgtctgttgttattgccgccgcggccgccgccctgtttgctgtactgtgcattgaacacagcagtaatgcttgattttttcttcgggcgctgctctgcgttctcagtttttgcaccctcagccggtttattctgctcgtttgcctgtggcttctgtgcaggtttattttccggtgctgctgtcttgttctctgcaggtttgctctctgacacattttctttattctgtgcctttgcagtattctccgctgctgcagactttccaaatttctttctcacgatatcctgtgccggatcatcgatattgctggaagctgctttcactgcatattccgtcgtatttaatgtttctataatctgtttactctctattcctaattcttttgcaaggtcatatactctcatttttgccatttatcttaattcctcccattattcagttgtgattgctgtttcagtctctcttcgatcgagtgcgacagtccctcgtttgtgactgcaagcgatgcacgaaattcttttccgatgaaatgcccgagcatttctttgtccgaatattcatacattggcacctgataaaaatctgtcatatttcgaaacattttcttcgtattgtctgacgcatcctgtgcaacgatgacaagatatgccctgccctcttttaccgccttttccgtagaaaattctccactcgccacactgccggcttttgcggcaattcctagcatagataacactctatctggtttcaagctgttccatctcctttgtcagcgtttcatatacatctttcgggatcggcattttaaatgatcgttctaaccctttattttttatcgccattgcaagacattcacggttcggacagatataagcacctcttccgttctttcttccggttgcatctaaaatgatctccgtttccccttcttccgtcggcgctgttttgatcacacggatcatatctcttttggctttcatctcatgacagccgacacactgcctcatcggaatctttttatttgacattcttcttaatacctcttattctctgtcctcaccatcagcttcggcattgttttcttctgctccgtcagtctcatagctttcctctgccggtgcactgccgtcctcgtactcctcataggacccgccgtcctcatcgtaatactcatcttcctcgtaatcattctcgtaatctaagaaatcgccggactctctcgcctgtgtctcgctcttgatatcgatcttgaatcctgtcagacgtgctgcaagtcttgcattctgtccctcttttccgattgcaagggaaagctgataatccggaacaaccacttttgcagatttttcttctgcatccgcgataacagaaataacttttgccggacttaatgcattttcgatcatcattgccggattctcattccaggtgatgatatcaatcttctcaccacgcagttcaccaacgattgcattgactctggcaccattcataccaacacatgcaccaaccggatcgacatccggatcgtttgaccatactgcgatctttgttctgcttcctgcttcacgcgcgatcgccttgatctctacgatgccctcgcggacctcagccacctcagactcaaacaggcgttttacaagttccggatgtgttctggaaactaacactttcggtcctttagaagtagccttaacctctaagatatataccttgatacgctctgtcggctggaacacttcgccttttacctgttcattctctgttaagatcgcatcgacccttcctaagttaatgctgacatttcttcccacataacgctgtaccacgccggtcacaacatctttttccatgctgtaatactgatcgtataaaactttacgctcttcttcacggattttctgtaagatcacgttctttgcattctgtgttgcgatacgtccgaattccttagactgtacctcgatgttgacaacgtctccgatctcatatttggaattgatcatctttgcattgaccagactgatctgctctaccggatcttctaccgtttcaacaactgtcttttcctgaaatacatgaaactcacaggtttccggatcaatcgatacttttacgttatcggatgaaccaaaatggttcttgcacgctgttacaagagaattttcaatcgcctcaagcagtgtatccttgctgatgtttttctcctgttctaatatatttaacgcttctaacaactcattattactcattattaaatcctccttgttttgcggagcaaaatgcctgctatgctgtttttgcatagcatgtgcccttgcagggagcaatgcccagcacactgggcaggattttcctcctttagttcatctttaaaagtcaaatgccagacggatcagtgcgatatcgctcttttcaaacgtcatttccgttccgtcctctgtttttatcgtcacggtattttcatcatatgcagacaaaataccataaaattccttttcacggttgattgcacggtatgttcgtatctctacttcttttcccatgctgcggatataatctttttcttttttcagcggtctgccaagtcccggagagctgacctcaaaaacataggagtcctcaacgaaatcttctctgtctaaaatctcgttcatctcccgcgccactgcctcacagtcgtttacggtaatgccgccttccttgtcgatataggctcttaagtaccaggtaccgccttcctttacatactccacatcgaccagctcaaaattcatgcggtctaaaatcggagtaatcagttcttcggtgcgcgtttcgtatgtttcacgttttgacatgtgtacaccttctttcttccatattcagttttccttctgcatgcatttctgttgcagaaatacatggctcctaaacgtgaattgagagagggctttcgtcctctctcaatcaagtcatcgtgttatcatttattaatgtaacactttcctctttaaaatgcaagctatttcttaataaatgacattctttctttttcagaaagttccattactttctttcctttttcttttgcataagtcctctcaaatccattttggtctggatctgacttaacaaaacaggttccggtgttttttctaaagaatctctatatttcttcatctgtccagtcatagtcatacacctccattatttttttagcatttacctcatcaatagcaaattgatatggatgcagtacgccaatcacctctccattaaatgtttctacataatgatcgagtaattctttattagcagcaaagccatacatatatccatcatacccataatcgacagatttttgtgctgcaatcgcaaatagatgacctccaacgcctaaatatcgaatatcatcggtcaacagtttattgttatccggacttgtacacaaaaaagcaaaggaaaacattacgcccaaaaatttatattttacgccacaagaaaccagaacagaaaaaccgcaccaaaaaccccggcaacaacgccgatattccatgcaagatactgtttccttttctttttccggaatgcagccagttcttccctgtgctccttcgcccacggcagatactgttctaaatataattccgcggctttttgtgtggtaagtcctgcatatccggcagaacgcagccggtataagatccactggtgctcgtcgatctcctccggccccgctgttatggaaatgtctttctgcgctgttgctgccgccgctttccgcagtctgcgccattctttctgttttaaaatgctgtccggatcatcatccgctaagtaagtctcaaaaaaatccagcatatgcgagccgaaatttttgcatgtcaggatcctttcccctaatttccggcgcacccctgcatccgaaaatagcgatctgtattcctcacgcgaaaacaaagcccgaaaacagttgatctgatttgtcagacagggattttccatcaataactcaaactccagaaaaaactgctcttcgttctcctttgaaacatacgaagcgacctcttcataattataaggattctccccctcggatggcttctctgtatcatcctcccacatctgcgtcctgttttcttctgcctgcat

SEQ ID NO: 5307 - DNA, 2703 bp, Unknown
  gut microbiota DNA sequence
tgccatacggtatgcgctgcgcagtctctgatattcctttggatgttcctccgggtgatacagctttgcctttctcgcgtatgccctttttatttctgttttatcaaaagtctcctctatccctaatatttcccagatatccatatgctactcatcctcatgctcttcccagaaagaaggatcttcctttaaagaaaccctgttctgttccaccgcttctaaatagagcgacagccgcacatactgctcccggatgtcacgctctgccccatagtccaccgcctccgcaaactgctttaacaataccctgatattttcgcggacaactccactgctctcctcaaacagacgctttgcgcgctccacaagcagccggtttctctccctgcccgccggataaagcgctgtctgattcattttttcaatgcacttgtctaattcttcccctgacatccggatattcttattgagtatgacctttcgaacctcattcgtggcacttttaatatggatatccaaaatcccgttgatatcatataaaaaagtcaccaaaaccccagtctctctcgccggagcttccggcaggtccgtaatatcaagttccccaagcaaaagattctcttttgcgttcaaatgttctccctgataaattttaaaatgcattgtcgtctggttgtccgctgtcgtcacataataacgcgatctgctgcacgggagcgaatcattccgttcaatgatcgtcgaaaatgttccatcataaatttctgttcccaaagaaaacggacagatatcggcaaggatcatgtctttccattccacagaccgctccttgatcgccacagtcagacctaccccgatggcaacacattcatccggcctgtcatccatcacaacttctgtttcagaaatactttccacataacgcctgacgaccggcatcttagaggatccacccgcaagaatgatgcggtcaatatcctcccattgcataccggcatcatccatcaccctctttaacgggacagacatcctctgaaacaatcctgccgctatcctgatcagcttctgattgtcaagccgcatcacatattctttttctccgagcagaacggttctttctgccgtatcctcttttgagagctgcttctttaaaagttctgcctcccgcaaaacgatcccgtgttccttttcgcccagagaagacggatcaatcccacagtttttcagaaaatcctccgctatgacctcattaaaatccttaccgcccagatggttatcgcccgcaaccgcccggatctcgaccatattgtcaaacgcttccaccaaagacacgtctaatgttccacctccaaaatcaaagataatgaaagtctccatctccttttcccgcacctgatggcgcagggcaaccgcagacggctcattgacgatccgttccacataaagtcctgccagttttccggcatttttcgttgcgtaacgcctgtcgtcatcaaaatatgccgggacactgatgaccgcctcggtaaccggctcaccgagaaacttctccgcatcctcttttaattttttcaggacaaacgcagacagttcctctgcccggtactcctgcccgcatgcccgaaaaatccgatccgtccccatatcgcgcttgaactccgcaaaagtctgctttggtcttgtgatctgcatttcctttgcgatctttccgacatagacctccccctgatctccaaaactcacaacggacggcgtcaggtaatcaccgttcggatttggcaccagttcgatctttccgtccctgcataccgcacagagactgttggtcgtgccaagatcaatccctatcactgccatctgctatctcctttcgccgctttttaccgctgtctgattctgctttatcatcacatggtcaagatacatctgtaaaaaactctcatatccggcatactgcttacttaccgcaaacagtttctttccctttttcccataaaatgtcactctctcaaaaaattctttttttgacacgacctcatcccacgtaaagatcctgcacctgcccagtgttcccgtttttgttccaattttgtgcgcgcctgccgccacctcggtcagtgtacttttccgcacccagcacaaaaataaaataagcgccagcgtcataacaagcaccggaagatcttttatgatctcctgcatccctgccttatgataatccgaaacacacaatacaatatcacagaccagcatgacaccgacgatcccgtacaaaaacatcatcatctgcgccagaaacgggtttggttcaacgatacagaaaatatcttccccaagccttgctttccatttttttatttttttgtagattttgtttttcatcccaattccctccccctgcgttccattgtagcatatcatatttgtaaaagatacctgtttttgacaataaaaaaattgccaatataccatctggcatactgacaacttccgggttgggctgtttatctctttcgaaataacagtgagtagctcgtaggggaatcgaacccctgtttccgccgtgagagggcggcgtcttaaccgcttgaccaacgggccacaaatatttgatttatctctgttataaaacagaatagctcgtaggggaatcgaacccctgtttccgccgtgagagggcggcgtcttaaccgcttgaccaac

SEQ ID NO: 5308 - DNA, 493 bp, Unknown
  gut microbiota DNA sequence
ggccggtcaccctctcaggtcggctactgatcgtcgctttggtaggccgttaccccaccaactggctaatcagacgcgggtccatctcataccaccggagtttttcacaccaggtcatgcgaccctgtgcgcttatgcggtattagcagtcgtttccaactgttatccccctgtatgaggcaggttacccacgcgttactcacccgtccgccactcagtcacaaaatcttcattccgaagaaatcaaataaagtgcttcgttcgacttgcatgtgttaagcacgccgccagcgttcatcctgagccaggatcaaactctcatgttaaaaagttttcctgtccagttataaactggcttaatcagatatatctgatttactgttttaaggttgtttctttatagaaacgttcgtgtgttgttattcacaacaccctgaaattcattgaatctttcaaggttatttcactgttcagttatcaaggttctttgttt

SEQ ID NO: 5309 - DNA, 333 bp, Unknown
  gut microbiota DNA sequence
attaggccgtattaaatgactccgacgggaatcgaacccgtgttaccgccgtgaaagggcgatgtcttaaccgcttgaccacggagccttatctttcttctttcatcaaaaaaactccccgagtaggactcgaacctacgacagcgcggttaacagccgcgtgctctaccaactgagctatcgaggaataatctaaaggtatttctgataccttcaaaacttcatacagaactccgccaaccaactgtgaagttgcaaagcaacttccaatgcgaacatcgttcgctatttggtcaagccctcgatcgattagtaacagtcagctccacacgt

SEQ ID NO: 5310 - DNA, 359 bp, Unknown
  gut microbiota DNA sequence
taaaacgtaaccgggtattccgggaaggaacgataggcggaaaaaggttgattgagcggctgaagaaacggcatggacattttgcggatgtgattgtggcggatgcgttatatctgaatgctccatttatcaatactctgaaggaaaatggtctggaagggtgtccatataaactgcgtgtggtgcggtatcatgagcagtgggaagaaaatggaaaagaaagagagcgtttcatgtggcttgtaacgacactggaagcggcggactaccgggtcttatgggaaatgatgcaccgcaggtgggacattgaggagaatggtttccatcaattgaaaacgtattatcacgcaaagcactgt

SEQ ID NO: 5311 - DNA, 193 bp, Unknown
  gut microbiota DNA sequence
caaagcctgagctgattttgtgactttgggagaaaattagaaaatcttagtgtgtctgtagatacacagtgatgttctgccacggatggcagaacaaggcttcacgagccacggatggctcgttgaacgccggtcacgtcactccgagaaaatctaactcagacacacttagacttttcttattttcgtacaa

SEQ ID NO: 5312 - DNA, 486 bp, Unknown
  gut microbiota DNA sequence
tgaacctgttttggactgtccccacattcctctccgatcagctcaatactcttctttcctaaattatggtccacctgaccacattttcttcttccggcttttcgtttgattgcttcgtacttcatcttataagcaaatgctttttcacttgggctgatcatttctctttgtaggtttgaatcaaccattaatacaacagcttcatcatctttaaggactcgtattatcacaggaacctttctatatcctattttctcagcagcaaattttcttcggtgcccggatataatctcataacatccatctttcttcggtcttactattaaaggatttaagataccatactttttgatactctcctgtaattcaatcatctggctgtctgccctgaccttgaatggatgattttcaaatcctctcaatctttccagctcaatctcaactactttttcatcttcttccaataattctgttttttctgccata

SEQ ID NO: 5313 - DNA, 209 bp, Unknown
  gut microbiota DNA sequence
gaaaatagtgttacttttactctgatttacaccccaattcttatcctacattgtgccttatctctccgggtgacgatctgaaaaataaatcctgatgacaagatttcattttcgctgacaaaatccatttttcaatcacttttcgctgacaaatttgccatcaaaatcaaaaaaaagcaatcgagtaggagggaaaattaaataaattt

SEQ ID NO: 5314 - DNA, 8120 bp, Unknown
  gut microbiota DNA sequence
cacacatccatgccgctggaaatattccatcgttgaggagacaagaccgaatgaatatatgccggtttatgagaatgaacgtggcacttatatatttaactccaaggatctctgcatgatcgaacacataccggaattaatggaatcgggtattgacagttttaaaattgagggtagaatgaaaacagcactatatgttgcgactgtggcaagaacctaccgcaaggcaatcgatgattacaaagagtcaccggagctttacaaaaagaatctgccatggtatttagatcagatatccaactgtacttaccgccagtttacgaccggatttttctttggaaagccttccgacgaggcgcagatctacgacaataacacttatttaaaagaatacacatatttaggaattgttggggagcagaacgaagatgggctttaccggatcgaacagcgcaataagttttcggtcggtgaagagatcgagattatgaagccggatggtgaaaatctgacggcgacagtgacacggatcatggatgaggatggagcggatatggaatcagcaccgcatccaaaacaggttttgtatattgatctgggacatccgctcgagaagtatgatattttacgaagaaaagagtagggaggaaaatactctgccccgaaaaataaggaggataaaagtatgaaaaaggaaaaatatgtggcttatgtaggtacatatactcatgaaaacagtgtcggaatccatatttatgatgtggatgtggcaaatggcagtatgaaagaacgtaaagtagtaccaatcaataacccgtcagatcttgttgtttcaaaggatagaaagttcctttattcgattgctgatgaaggtgtggaagcatttaaggttcttccggatggagatcttgaggctgtgaataaacagtggattggcggcatgagaggatgctatgtggaagtggatgatgagaatcgttatcttttcgttggtggacatcatgacggacgtgtgacgatgatgcatcttgaaaaagatggaagcatcggagctatcgcagatggtattttccatataggtatggcgcgcggaagcgacagacgtaccaacacaccacatgttgactgtgtaaaactgacaccggatcagaagtttttgtgtgcagttgataacggattagatcaggttaagatctatcgtgtggattatacttatggtaaattaaaactggtggatatcattcgtggaccgcttgagtctgcgccgagaatgatccgtttttccagagatggaaaatatgcttatatcctgtatgagttgacacatgagatcgaagtgtacaaatactccgttgaaaatgaacagccacagtttgataagatccagacgatcacaacacagggaaagaaagaggaagatatctgtgccgcatccggtatggagatcactaagagcggaaaatatctctttgtttccaatgccggtgtgaacacagtggttgcatatgagatcgatcctgcaacaggtatgctgacacaggcattccgcactaaagtagacagtgattatccgaaaatgcttgcaatttatccggatgagaaacattatcttactataaataatacatccaatgatatcgtatcttatacgatcaattatgagaaaggtttctctctgcagaacggtgcgccggtcaaggttgataagccaaactgtatttatatcttaaaattagaagaataagagggattccgtgcatcttatgtcacggtcaaacacccgcagtatgccagagatggtatgctgtgggtgttttttatttgtgcaatttaccaatcaaaaaaccggaagccacctttcgacatccgaatccttgaaggaaataaaaatatttcataaataagaatgagattgcccaaagcggatatagataataatagtggatgaaaaaagatacagaaaaggaaaaatggtgggcgatgaacagggaagaacgattgaggcggcaaaaggattttctgaccggatttgcattctgggtggtgtggcttgtgattttgtgggtagtgcttaaggcggcaggttctgtgctgtttccgtttcttgcggcgtttgcggtggcggtactgctgtcgggagcggtacagtttattgcggagcggatgcatattcaaagagggatcgtggcggtcgcggtcgttcttttcttttatattattttagcggtattcctttattttgcgggcagttatctggtgcgtctgatttacgatacggcaagggaattatccgtatttttttcagatacgatcgtcccggtcatgcagcgcttttaccagtggttagaccgctttgtttctgtattttatccgacagaactgacaggaaaaacatccggtttacatggagttggggaagagtccgcacagacactgaaaaatgcaggaaagctgatgtcgggcatctcagatggtgttattgacggggtatccgggatggcagcaggaataccgggattttttatgaaacttctgatcacagtgatcgcaacggtatttatggaactggaatttccacagatcagggcatttttaaagcggcagatcccggtggaataccagcgggcgttccgggatggaaaaaattatgtaacagggacaatgggaaaatgcattctttcgtactgtctgatttttggtattacatttgcagaacttacagcaggtctgtttttgcttggaatcaaaaatgcatttgccattgcatttattattgcggtacttgatatccttccggtgcttggaacaggaacagtgctgatcccgtgggcagttcttgcttttgcatctggaaggatttctaccggagttggcgtgtttggactttaccttgtgattacggtcgtgcggaatctgatcgagccaaaactggttggaaagcagatggggttatcaccggtgattatgctgccgtgtatgctgattggcttaaaattttttggaattatcggcctgtttgtggtgccgcttctggtttcatttctaaaacagttgaatgacagaggaattataaaaatctttcgttaaggcatttgaaaacataaatggcagaaaatagaaaactccataagttcctggaatgataaaaataacctccgcttataaatgaaaaaatttttcgctaaaaattggattttgggtgaaatacggcgaaaattgcattgacggaaaaatttctctatgctaaatttactcatgtatttctatcaagtagtgatacaggaggatgaaaaaatgaagaaagcattaagcgtattattgacaatgggacttaccgtttccatgctggcaggatgtggttcaaatggagctgcagacaatgcatcagcaggcaatgcagcagataacagtgctgcagacaatactgtagctgcgacagagagcagtgcagcagccggcgaagcaaaatcagcatcggatatcaaggtaggtgtgatctacattggtgatgagaacgagggatatacagcagcacatatggctggtatcgatcagatgatgagcaatctcggattatctgaggatcaggtcgtagagaaaactctgatcccggaagatgaatctgcttatgatgcagcagttgatttagcagatcagggatgtaacattattttcggtacaagctttggacatgagagttacctgcttcaggcagcagcagagtacccggaggttcagttctgccatgcaaccggatatcaggcagcatcttccggactttccaatatgcacaactattttgattctatctacgaagcacgttatgtttccggcgttgttgcgggtatgaaattaaacgggatgatcgcagacggaaccataacagaggatacagctaagatcggttatgttggtgcattcccgtatgcagaggttatttccggatttacttctttctatttaggagcaaagagccagtgtccttccgcaactatggaagtacagtatacaaacagctgggcagatatgtctggtgaggcagaggtagcagcaaaactgatcgatgacggatgtgtcctgatcagccagcatgcagataccactggtgctccaagtacctgtgaggataagaaagttccatgtgtcggctacaacgttgatatgacaactgttgctccggatgcagcacttacttctccgacaaataactggggtgtttactatacacatgcagtacagtgtgtattagacggaacagcaatcgagactgactggtgtcagggatttgcagaaggtgcagttgacattacaccgatcaacgaggcagttgcagcagagggaacagacgcaaaagtaacagaagttgaaaatgcaatcaaagacggatcacttcatgtattcgatacatccgcatttactgtaaatggttcttccttagaagacctgatcgcagaaggtggcgattatgcaaaatatgcagattatgtatcagacggatactatcatgagtctgagctggcatctgctccatctttcgatatcattattgatggtatcacttctgtgaccaactaagagcatctgcggtgcagaatgattgattaagatttttagcagaatataattctgccataatgcaaaagagcatgtctgaatgaatgctttttgtatcataaataagcggaactgtgaaaggacagaccttttatcacagttccgcagtttacgttaaaggaggactgtttgtggaaccggtaaatgcgattgaacttttgggggtcaccaaacgttttggagaggttgtcgcaaatgacaatgtaaatctgacagtgagaaagggagagatcctttctatattaggagagaatggtagtggaaagactacgctgatgaacatgctctccggtatttatttcccggatgagggagaaatccgtgtgaatgggaaaaccgtgacgatccggtccccgaaagattccttcgaactcggaattggaatgattcatcagcatttcaagctgatcaatatcctgacagccgccgagaatattattttaggtctgccgggaaaagaacgcctgaatttaaaacaggtggaaaaagaagtcaaagaactgacagaccgctatggttttgatttaaatccatcccagaaaatttatgatatgtccgtttcccagaaacagaccgttgagatcgtaaaggttttataccgtggcgcggatattctgatcttagatgagccgactgccgttttaacaccgcaggagactgaaaaattatttgcggtattgcgcaacatgcgtgccgcaggaaaatccatcatcatcatcacacacaagttaaacgaagtattagagctttctgaccgtgtggcagtgcttcgaaaaggaaagtacatagatacggtggagacaaaaggtgcaacggtagagtctctaactgagatgatggtcggtgaaaaagtaacgcttgatatcaaccgtaccgaaccggaaaatgcaaaaaaacgaattgagatgcgcggtgtgacatgccggaacaaggaaggtttaaaagtattaaaagagacttcctttaccgcatacagcggcgaaattctcggtattgcaggaatttccggaagcgggcagaaagaactcttagaatctgtggctggtttgcagccgatcgagagtggtgagatcctttatgagtcaccggagggaaaagtcgaaaaaatctccgatatgaaggcggaggatatcaaaaaacttggtatcgccttatcctttgtcccggaggaccgtctcggaatgggattagtcggttccatggatctgacagataatatgatgatccgcagttacaaggaaggaaaacatttctttgcagaccgtaaggcaccaaagcagcttgcgcaggaaatcgtggacaagcttgaagtcgtgacgccgggagttgagactccggtcagccgcctttccggtggaaatgtacagaagatccttgttggacgtgagatcgcaagcaatccaaacgtgctgatggtggcatatccggtgcgtgggcttgatatcaactcttcctatacgatctataatctgctaaacgaccagaagaaaaagggagttgcagtcatctgtgtcggcgaggacttagatgtgcttttagagctgtgtgacaggatccttgtgttaaatggcggaagagtttccggtattgtggacgctagaagtaccacaaaagaaaaacttggacttttgatgacaggttcgggagaggagaaacaggcaaatgagtaaagaagtaaaagaaccggcagttcgtatgataaaacgcgatacgatcagcacagcaaaagcatggggaatccggcttgcagccgttgcattatcactgatcgttgcgggacttgtgatcgttgcaatcacaaaacagaatccgatccaggtatatcttggtattatagacggtgcggtaggaagcagccgtcgtgtgtgggtaacgatccgagagacattggtgcttttatgtattgcgatcggactgacaccggcatttaaaatgaaattctggaacattggagctgagggacagatcttaatgggaggtatggcaactgcagcactgatgatctatgcaggggatgcgatgccaaactggctgcttttaattctgatctttattgcaagtgcggcggcaggattgatctggggactgatcccggcagtgtttaaagcatatttcaatacaaatgagacattgtttacattgatgctcaattatgtggcaatgcagtttgtcacatttgcaattgtattctgggagaacccatccggttctaacacagtcggtatcatcaatgcggcagggcagaaaggatggttcccatccatttttggaaatatgtatggactgaacgtgatcgttgttctgatcatcacactcggcatgtatgtatacatgaaatacagcaaacagggatatgagatcgcagttgtcggcgagagccagaatactgcgcgctatgccggtatcaatgtaaaaaaagtaatcatccgcacgatgatgctctccggtgcgatctgcggaatcgcaggctgcctgatcgtcagcggtgcgagccatacgatctccacaagtacagccggtggacgtggatttaccgccatcattgttgcgtggatgtcaaaatttaatccgtttgcaatgatcttagtatctgcatttctggtatttatgcagcagggatcgattcagatcgcttcccagtttggtttaaatgagaatgcgtcggatatcattaccggtattttactgtttttcttaatcggctgtgagtttttcatcaattataagctggaatggaaaaagaaccataaggagggaaaataaatgaatctgcttatgacattcatacaaaaagcgatcggacagggggttgcaattttatttggtgcaaccggagaaatcgtgacagagaaatccggcaatttaaatcttggaatcccgggtatcatgtatatgggcggtatttctggtctgatgggggcattcttttatgaaaatggcaaagaaaacccgaatggatttgttggactgttgattgcatttctggcaacactgatcgtgtctgcattaggtgggctgatctacagtttcctgacgatcacactgcgtgcaaatcagaatgttgttggtctggctttaacaacgtttggagtaggttttggtaacttcttcggcggttctatttcaaaacttgccggaggtgtcggacagatttccgtacagactacagcggcggcgtttcgtgcaaaaataccgggactttctgcaatccctgtgatcggagatttattattttcctatggttttctgacctatttatccgtgatccttgccgtatgtatgacttatttcctgaaaaagaccagacgcggcttaaacttacgcgcagtcggggagagcccggcgactgcagatgctgcaggtatcaatgtatcaaaatacaaatacattgcaactgtgacaggagcagcaatcgcaggtcttggaggactttattttgtcatggaatatctcggaggaacctggtctaacaacggatttggtgaccgtggatggctggcaatcgc

SEQ ID NO: 5315 - DNA, 2212 bp, Unknown
  gut microbiota DNA sequence
gtgatcacaagtaaacgaaataaacaggaaaaccagccaccggcaagccttggagaagcatacttcagggaagaccgataatggtttaaagaaaagaaattactttgcggacagcagcactcatctgggtgctgctgtttgtgactaaacagatttcacgttccggtatgggttcgacgagacggatcgcgtaggcgctgccgcgtgcgatcgcctctgcagcgagctcctccgggtaaaaaccgataccgagattgtgtgtgatcataggaaggatctggtcggtggtggcagcctccatatcaggtgcgaacatcagaccatgacttaagaaataacggtgatacaattctctggtcccggtgccgtcggcaagccctataaccggtattccggaaagatcatttaagcttcggatctgtgaagccagttctttatattttgttcctccgatcagaatttcgcggtaggaggcaaggtgtgttttgtgcagtggcttttggatggtaagtggtgaggtgactgctgcaaaatcgacgaccttgctctctaatgctaaaattgcctgtggtgtggagtgattgaaaatacggatgcgcacatgtggatattgttcgtgaaaacgttctaataccggaagcaatagcaggcgcagcgcattttcactggctccgatggaaaccagtccattttcgagatccctattctgacggatctcatcttccccaagcgacagctgctcataggcaatcgcaacatgttcatataatctttttccttcgggagtcagcgttatccccttgttagagcgcaaaaacagtgtacagtttaattccgattccagattattcatgcaccttgtgatatttggctggttattgtgcagtgcctctgcagctctggtaaaacttttatactgtgcaacatagtagaaaatacggtaatagtcgtaagtgatcatgcggtgttttatctccttttatttattatataaaaatcatatgatggatatatcaataatactttttacatctgataacagggatactataatacagacgatgtaagaaatcaatgagaaaaaacgggaataagaggtgagaacattggctttgaatcaaaatgagccaaggagtacgaaagtgcagatgtcggaggcgtttatcacgagtgtgtttctggcactgtccggtgggttccaggatgcatacacttattttacgagagatggcgtgttttcgaatgcacagaccggaaacgtggtactcatgagtcagcattttatgatgggagagtggagtgagggattgcgttatctgttcccattgctcgcatttgcagtcggtgtgtttgtggcagagaggatacagggaagttttaagtatgcgagaaagctgcactggagacagtcagtattactctgtgagatggcaatcctggtgtttgtgggatttcttccggagaatcttaatatggcagcaaccgtgttagtttctttttcctgtgccatgcaggtgcagacattccggaaagtcggcggatattcctacgcgagcacaatgtgcatcggaaatctgcggagtgggacggcagcgttttcactgtatctcagggaaaaaagaccggaacagatcagacaggcactttactattttggaatcattttattctttgcggttggtgcgggaatcggaggaaatctgtctgtgaggtacgggtttcatgtgatctggatatccggtggacttctgttgatcagttttctgctgatgttcttagaaaagattagataatggagggaaaaaggatggagacaatatttccaagagaagaaaaagcagatctgttgtttgataaaatcttgaaagatccggaagcctgtgagcgtctgatgcagactttttatggagaaattgattcggatcttgaactggtgggaggatatcttccaccggaacagtttgctaaggcattgtttgatgcctataaaaaccgggatctgacagcatttttgatggcagtctgtaaaaacagcatgtttgacttactgcgcaactcatttttggcaccgttccgctttaatgcggacggacaggtcaatccgtatctgctcacggacgaggatggaaatctgatccagacaaaggagatccatgtgagtgaaaaagattataaccggtttaaaaaggtattccggaaagagaaaggtgta

SEQ ID NO: 5316 - DNA, 8184 bp, Unknown
  gut microbiota DNA sequence
ctatgatgcggatacgatggatgtgatggaatataagatgggtgagcacatcggtcttttgcttgtctatgaactgccggatacggtaaaacagcagaggacggaagcacaggcttatgcagcagtgtgggatatcatgatgaaactgcaaaaggacctgccgcgttcctttgtttattacggacaggattctttggaagatgaaggtcagaggtttgatgaactgggcgtatttttaccgatccaccgtttttcggaacggttggaaaagagtattgatacagcagataagattgtacatgcacaagcataaaaggagtgtgaatatttatgttaacagcagtaactggtattaactggggcgatgaaggaaaaggacgtgtcgtagatttattaagtgaacacgccgattatgtggttcgttatcagggaggaaacaatgcaggacataccgtagtgacagataaaggtaaatttgttttgaatctgctgccgtccggtattctgcatccggaggttgtctgtgtacttggaaacggaatggtcattgatccggatcacttaagacatgagatcgagatgatgcgttacatgaatgtaaaaatcagtccggaaaatttaaagatatcggaaaaagcaaccgtctgcatgccattccatgtcagacaggacgttttagaggaggagagactctctaagaccggggaggcatttggctccacaaaaagaggaatcgcctatgcctatggcgataaatatatgaagaaaacgcttcggatgggagaccttttatatctggattcggaagtgatcaaaaaacggatcgcaatgatcgtagagagcaaaaatctgattcttgaaaaggtatatggccaaaaaccactctcagtagaagaggtcatggactggtgcaagggacaggcagaatttttaaagccgtatattaccgatacgggggtgctgttggaaaaggcagccgcagaaggcaaagatatcctctttgaggcacagcttggcgcattgcgtgatattgattacggaatttatccctacacatcaagctctagtacgatcgcagcctatgcaacgatcggagcgggtattccaaaaagaaaaccggagcgtgtcgtaggtgtcatgaaggcatattccacatgcgtcggcgagggtccgtttgctgcagagaaggctgccggtgaggaatggaatgataaattgagaaaagcgggtaatgaatttggggctgcaaccggacgtccaagaagagtcgggccgtttgatgcagttgcaagcagatatggactgcagtgtcagaatgcaggagatattgccctgaccaaactggatgtattgagcagctttgaaaagatccccgttatcacgggataccgtgtgaacggaaagcttatcacggatttcccgacgagtgtattgcttgatgctgcaaaaccggaggttgagatgttagatggttggaactgcgacatctcatcctgcagaaactggaatgatcttccggaaaatgcaaagaagtatatcgagaggatcgaggaactgatcggacattccatttaccttgtttccacaggagcaaagagagatgaatatttattgaaagaataaaatatcaggtacagtaccggaacatcttatcggtcagtattcttgcaaagatcagtccgagaggcaggcatacgatgataaggatcgcagaggcaaaccaggaggccgatgcatccaaagacatgatgccgagattgtagatcgcgcggtacaggtataatccgggaaccatgataacgatagatggaacggtgatcgcaatccttggataaccgacatggttttttaaaagggatgcgagcagtccagcggtcagtgcacctaaaaatgcagcggccgcggaaggtgttccgagaagatccacaagttctaaccggaatgtatttgcaatggcgccgatcacggctgcggctgctgcaagctgtctgggactgttaaacatgattgaaaatccgaatacgccgcagaaacttgcaagcagacggaagatgatcttttctgtcagagtaaggtttaaaggaagaaaatctacaggctgcaaatgaagtaaaagggctaccatccaggcaaacatagtggcgacggcaataatgatcagtgcgtaggcgagacgctcaagaccggagcgcatatcaagttttgcgaggtcgattccgctggtgataaatggaaaaccgggaatgataaagagcatggcacagatataacctgcttcatgctgaatggagattccccacagcagctctgcaatttttaacagtccggcataaactaggcaggcacttgagacggatgctgcaatgcagagaaacagtgtaaaatgatgttttgtcagtttgcaccgcagataatttccaatgccggcaccaaagaaggcacagagcatttcaataggtccgccgccgagtaaaaatgtaaatgcgctgcatgcaagcgctgatgcacatccaagtgcaaatggggagtaaagcccatggatctgttcaatctggtctaaataagtatggatctgttcgccggacattgtgcagcattcatggtcaaaatcattgacgaagcgttccagccggtttaattttgaagtattgacaccggtatttgtcaggcagagagactgcgagtaacagtcggttccgtcaaagcaggtatattcgatcgacatcagtccaatgtcagcggtacaggtaacaccgagcagagtggcaagactgttcatggaactgcgcacacgccatgctccggtaccgcaggagagcatcataagaccggtacgaccgatcactgaagctttttcagtcagtcctgtctgggtgatcgggagtgatttatccgatcccgtaaactggtgccagggaatatccatatggttttttggtatctggttctgcatcatttgtaaacacttctttctgaataatgtcatgtaatttgctgttataaagtgtatctgttcttcctgaaaagtcaagtatgtatctgtataaattaatcccaaaatgagccgataaccataatagaaacaaaaattgccggataaatggaattagaaggcgaaaacaaatttttcagggaggataaaaacatgagtgagatcagcagcaacagtgcattaaattcttatgcagcggactattcttaccgcacagaacacaacaaaaaaacagacagcaataaaaaggccgacgttacaaaagaggcagacaagaccacaaagaaaagcaaggtgagcggcagaaccataggtgatccggttctgagcgataaggcccaaaagtattatgaaaaattaaaagcaaaatattctaatatggattttattcttgtctctccggagaaaaaagaggaagcggagagcaagaaaggcatgtaccagagttccaaggaacttcttgttttaatcgattccgacaagatcgaaaagatggcggaagatgaggagtatcgtgcaaaatatgaggggattttaaacaatgcagcttcccggctaaatcagatgaaagatagtcttggctcgaaagccgattcggtaagctcttttggaatgacctttgatgaccacggaaatgcatcattttttgcggttgtggacaaatctcttgcatcccagagagagcgtatcgcggacaaaaaagaagctgcggcaaaagagaaaaagaaagcgcagagggaaacacaggaaaaacgtgcggaggagaaaaaggcggaccggacagataagaagggaaagacagatggtaccggtaaggcgaaagatacagaaaagacatcggatgcggatacagtgaccgtttccgcttcctcctgggaagaactgctgaaaaaaatagataacgtgatttatgaaagcagggcagattccgtgatgacaaaagaagaaaaagcagtcggacagtcttttgattattccatataaaaatactgggaaaaaaggacagttgaaccacaggtcattctatggcagaataaaagaaaatacagaagaaaatatgcataggtgacattgtgagatatacagtattgattgcagatgattcaaaacttcagagagtgattgtaaaagaaaatttaaaagatatctatgatgtggcagaggcatcgggcggacaggaatgtctcgatctggtagaacacagtgccgggaagatcgatgcagtacttttggatattgtgatgcctgggatggatggattcgaggtgctgcggagaaggcaggagtccggggtgtttcaaaagattccggtgatcgtactcactatgagtgacaggaaagaggatcaggaacttgcagaacagttaggcgcagatggatttctgctaaaaccggtcgatgcaaagcaggcgcgtcttcagatcagccgtgttttaagggaagactgacagagattacccatatgtaaaagaataaattgaatcacggaaacaaaacgtgtataatagactcagaaatatgtttgacaggggaaaaaatatggcacagaaaattattttaacgggcgaccgcccgacaggcaaattacatgtgggacattatgtaggctctttaaagcggagagttgaacttcagaattccggtgaatatgacaagatctttattatgattgcagatgcacaggcacttaccgacaatgcagacaaccctgcaaaagtgcgcagtaatatcatggaagtggcacttgattatctttccgtaggaatcgatccggcgaagtctaatatctttatccagtcttatgtaacagaattgacggagctgacattttattatatgaacctcgttacggtatcaagattacagcgcaatcctaccgtgaaatcagagattcagatgcgtaactttgagacaagcatcccagttggatttttctgttatccgatcagtcaggcggcagatatcactgcattccatgcaacgacagttccggtcggtgaagaccagatgccgatgcttgagcagacaaaggagatcgtgcacaagtttaatgccgtatacggcgagacactgaccgatccgcagatcttgctgccggaaaataaggcgtgcttgagacttccgggtaccgacggaaaggcgaagatgagtaaatcactcggcaactgcatctatctctccgagccggaagcagatgtcaagaaaaagatcatgtccatgtataccgatccaaatcatatccgtatcgaagatccgggtaatcttgagggcaacacggtatttacctatctggatgcgttctgtaatgacggacatttcgcagaatatcttccggagtattcctgcttacaggagttaaaagaccactatacacgcggtggtctcggtgatgtcaaggtgaagaaattcttaaacaatgttatgcaggaagaactttctccgatccgtgcacgcagaaaagaatacgaaaaccgtatcggtgatgtgtatgacattttaaagaaaggcagcgagatagcaaaacatgaggctgagaagacgctcgccgaagtaaaacatgcgatgaagatcgactattttgatacaccggagtttttagaagaacaggtggaaaaatttaagtaaaaaatatgaaaaagctgccctgcaggtggaaacacagcggggcgttttttattctccatgtatatggtttacgaagtgcagtattttgtgataaagtatataggtacatctttgggaaaggaaaacggacgtggtaagacgaagaaaaagtggtttaaactttggaagacggaagaagaaaatcaattttgcagtggtaaaagaggttttgtcgtggacagtagaaatagcactcacgttactcattgcgtttacgtttgtttattttatcggacttagaaccagtgtggtaggacaatcgatgtctaagacattaaatggcggagatcagattttagtaaaccgttttgtttataaagtgacagatccgaaaacgaatgatattgtcgtatttttgccaaatggaaatgaaaaatcccattattatgtaaagcgtgtcataggtgttccgggagataccgtacagatcaaaaatggaacggtatatgtcaacggaaaagcgtttgatgaggagacggatgtggcatccattgaggatgcgggactggcagcggaggagatcacacttggagcagatgaatattttgttttaggagataaccgcaataacagtgaggacagccgttatgcaaatatcggaaatatcaaaaaagattatattataggaaaagcctggtttcggattgcaccgttttcggaaattggatttctgtaaaaagatacagatgttaaaaaaatattgatagaaatggagaaaaatatgcaatttcaatggtaccctggacatatgacgaaagcaaaacgtcagatgcaggaagatataaaactgatcgatttagtgattgaactggtggatgcaagaataccacttgcaagccgtaacccggatattgatgaacttgggaaaaataaggcaagattgatcctgatgaataaatcggatctgtcggatgcgggaagaaaccgtgagtggtcggattttttccgtgaaaaaggttattatgttgtatgtctggatgcaaggagtaaggcaggaatgaaagatgtcacaaatgttgtgatggaggcctgtaaggaaaaaattgagcgtgaccggaaaagaggaatcaaaaatcgtccggtgcgtgcaatggttgtaggtattccgaatgtcggcaaatcaacatttatcaattcctatgctggaaaggcatgtgcgaagactggaaataaaccgggtgtgactaaaggaaaacagtggatccggctcaataagaatgtggaactgttagatacacctggaatcctctggccaaaatttgaagatcagagagttggtctttatttagctctgatcggtgcaatcaaggatgagatcttaaacattgatgaattatcattagagttgatcaaaatactgttaagcgattatccgaccgtactaaaggaacgttacggtgtggaggagaacgcagagccgccggtgatcttaggacagatcgcagaaaacagaaagtgtatctcaaagggcggagagttagattacagcaaggcggcagcacttctgatcgacgaattccggagtggaaaactgggacagatcacactggaacgtccgaagatacaggatggcagtgcagaatgagacagacagagatcagggcagtgtttgaaatcattctgtattttgcacttgtggcgtgtatcacttttttgatcattcattttgtagggcagcgtacggttgtaaacggtgtttccatgcagccgacactttctgatggagataatctgatcgtggataaactgtcctatcgttttcatgatccggacaggtttgatatcattgtgtttcctcaggaagatggcagatattttatcaagcggatcatcggactgcccggagaaaatgtgcggatcgatgaggacggatttatctatatcaatggcgaaaatctgcaggaatcatatggaaaagaagtgatgcgggatccgggactggcaaaagacgggatacagcttggagcagatgaatattttgtgctgggagataaccggaacgacagcatggacagccgtatggcggaagtgggaccgattgtgggagaaaggatcataggacgtgcgtggcttcgcatctatccgtttgatcagatcggttttttaaaacacggctcatgacaatagatttgcctgcggaaggtgtagtctattgtaaaaaatacagacagcagaaatggaagtgtcagagatggaagaacgaaaaataggacagatcaaagaggaattaaaggcggcaacggaagcaatgctgccttcttttattatggcatatgagtcagatgagagaagtggtgtcataaaacttgtagagcaggcaaaaaaaagactgcagaaattagaggaagaacgaaaaagaatctggaaactgcaggaatacgaacgaaaatatggtcagtacacctatatctgtgggattgatgaagtgggaagaggaccgcttgccggtcctgttgttgccggggcagtgatcctgccgaaagactgtgatattctttatatcaatgattctaagaaacttacggcag

SEQ ID NO: 5317 - DNA, 426 bp, Unknown
  gut microbiota DNA sequence
atataaaagtggttatcattggttatatacacatcatataaccaatggtaaccacttgtcaatcttcttttaatattttccgaagcatcggttcctcgtccaactgcacattttcaaattttttgtaaaatctgtcggcgttctcgttggtagcacggatcagataatattgatggatttcatgcttttcgcagtctttttcaaactctgcaaacagcttccgggcaacgccgctgtgccggtattccggtaaaacatatacccaattcacatacgccatgcgatatccaccctgaatacacccataaaaatgatactcaatccttcctgccacctgattgttttccatcgcaagaattgatgcagacttttcataaaatgaatcccgaagccttgtcctgattccttcctcatctatctcttcca

SEQ ID NO: 5318 - DNA, 459 bp, Unknown
  gut microbiota DNA sequence
ctgctcctccaacatcatcaatattttccgtaagttctcctccaccgacatacattcttccaagaccgcataaaattttatcagaacatgtataaaaatgacctgtaagtgacattgattcagaaccgtcttgagtacactgtcaaagttgatgacaacacatctgagaacctgcagtccgctgaatcccgtatccgtgatactgatatggcagatgagatgacaagattctcgaaagagagcatcttgcagcaggcagctacttccatgcttgctcaggcagaggatgaataaattcttctttttcttctttttccctttgcaacctccccattttcctgtatgatagagatagattaacagtaaggaggcatacagttatgttgcagattaaaaatccggttttgccgggatttaatgcagatccatccattatccgtgtggatgatacatattaca

SEQ ID NO: 5319 - DNA, 2106 bp, Unknown
  gut microbiota DNA sequence
gccagcagccagaccagagccagccacaggatcagagccagcagccagaccagagccagccacaggatcagagccagcagccagaccagagccagctacaggatcagagccagcagacggacggaagccagcaggatcaaagccagcagacggacggaagtcagccacagggatgatgaaaacaatttaacagatacaggtcaaagcaaaaaaagctcctgcgcattaaccaagcgcaggagctttttgctgccaatggattgataaacgatcaataacgttttatggaaggtttaggagctgctgtagtattcgttccggaagaatgctgctttggatgtgaaacttcttttgctgcagtattgtgggcagatacagaacctttgcgtggtacgctgcagcctaacagaacgctgactgcttcatgcatttccggatgtgcacgataggcttcaatgatcgtccgctcagaaggtgtcacatgaaaattctcattgctgtcatagccgaatgcttcaaggatatctgtgatattatatagatcgcagagtgttaaaaggatatctgcgcttggatttgcctgtccgctttcccatccgtaaatcgttttgggagcggcggtaaaagaacgatcctctaacaggatagaaacatcatttacagacaggtgattccgtttacgatattcttttaaaacttttgctatattctgattccgcatattgatctccgttctgttgcatttaaagcagccaaaatgctttttaatcgtatcatatcccacctcattttatcagtcaatgagttcttaattgcagagaaaaatataattgcaattcctaaagttaaagaatagaataagaaaaaaaagatttttgtagaagaggtgcgataacatgggaaaatcaaaagtgacggattatatgatccggtatattgaagaaaaccggatggatgcaaaatcgctggcggcacatgcgggcatcgatgcaggaaaattgcggaaggattataaggaaccgctggatgcggaggaatttctttcactctgcgcatatcttggtatcagaccggaacaggtacagcggatgctgtgaaccactatttgcctccgacataattacgtgcaatgcgtaaacagcatcagggtataaatatcggtaagatgtacatactgatcacatagagaacatgatataaaaatgtttggaaatggagattcgtatgagcatgcagacgggaaaacagagtatttgttttgaaacgccgccttatattgtaagcagcgcaagtattgtcggaaaaaaagagggggagggacctcttggtgcctgtttcgatctgatcggggaggatgataaatttgggcaggacacctgggaagaggcagagagtaccctgcagaaagaggctttcggaatggcagtcggaaaagcaggactgaaaaaagaagagatacgttatcttttttccggagatcttttaggacagaatattgccacttcgtttggactcatggattaccaggtgccgctctttggcctgtatggtgcgtgcagtacctgcggcgaggcgctttcccttggagcaatgtgtgttgctgcaggatatgcagattacgttgtggcgatgacatcgagccattttgccagcgccgaaaagcagttccggtttccacttgaatatgcgaaccagaggccgatgtctgcaacgtggacggtgaccggaagtggtgcgtatgtgcttggaaaaagaaagagcaatgcgtgtattaccggcatcacgaccggaaagatcatcgattatggaattaaagattccatgaatatgggggcggcaatggcacctgcggcggcggatacgatctgtcagaatttcaaagatttcggacggaaaccggaggactatgatcatattattaccggggatcttggaagtgtgggacaggagatactgatcgatcttttaaagaaagaaggatatgatatcagccaggtgcatttagactgtggtatgctgatctatgagagcaaagcgcagggaaccggggcaggaggttccggatgcgggtgttctgccgtaacacttgccgggcattttttaaaa

SEQ ID NO: 5320 - DNA, 208 bp, Unknown
  gut microbiota DNA sequence
cgttgtccgaaaataagaaagtctaagtatgcctgattcaggttgaggcggagtgacgtgtgcgtcctaaatgtgccgtccgggcacattaggacttgtgctgccgtccatggcagcacaacactgtattgtgaacaggcatacaaagactttctaattttctcccaaagtcacaaaacgagtcctggcttgatgcgatttgccagcc

SEQ ID NO: 5321 - DNA, 68124 bp, Unknown
  gut microbiota DNA sequence
caggcggaggtcgaggtcatggagagcctgggagtggatactcgtcgccgcgatgaactgcccgacctgctcggtctgcgaatcgacctggtggtggatctgtggtacgcgcagcagccgtggcacggcgtagaccgggcggaagctaccgcgcgcattattcgtcgcgccattgagctggtggaagcctcacgcccgctgctgccgggcgtacgcgaggcagtggccctgtgtaaagctcagggcttaaaggtgggcctggcctcggcctcgccgctgatgatgctggagaaagtgctcgatatgtttgaactgcgcgaccagtttgatgctctcgcctccgcggagcatttaccctggagcaaaccgcacccgcaggtctacctcaactgcgccgctgccctgggagtcgacccgcagcgctgcgtcgcgctggaggattcggtcaacggcatgatcgccagcaaagccgcgcgcatgcggtctatcgtggtgccggaagcggagaacagccgcgacccgcgctttgcgctggcggacgtcaagcttccgtcactgctggcactcactgctgagaacttgctcggctaagaccgctggcgggtgcaacaatcgctgtcacgccgccagctacaaaatcaaaacattgtttcattttaattgtaattttgttttcctccctctatgctggtcacaggtggcgtcatcgtacgccagtagatcagctgacagaggtgaatatggtactgaacgccttcgacctgacgggtaaggtcgccatcgtgaccggttgcgataccggcctgggacagggaatgacgctgggcctggcgcaggccgggtgcgatatcgtcggcatcaaccgtaaaattccccatgatacggccgcccaggtgctggcgctgggccgccgctttcacgccattcaggcggatctcagccaagagaatgatatgagcggtctggtcgaccaggcggtggcggcgatgggccgggtcgatattctggtcaacaacgccggaattatccgccgccatgatgccctgaccttcacggaaagcgactgggacgcggtgatcgacctgaatctcaaagcggttttctttctcagccaggcggtcgccaggcagttcattcgccagggggaaggcgggaaaatcattaacatcgcctcgatgctctcgtttcagggcgggatccgcgtcccctcctacaccgcctcgaaaagcggcgtgctgggtttgacccgtctgctggccaacgaatgggctggccagggtatcaacgtcaacgccatagcgcccgggtatatggccaccaacaacacccaggcgctgcgcgaagatgaagagcgtaaccaggcgatcctcgagcgcattcccgctggtcgctggggagcgccgaaagacctgcaggggccggtggtgtttctcgcctcatcagcggccgactatattaacggctatacgctggccgtcgatggcggatggctggcgcgctgagagtttgtgacaaagagttacaccgtcacctcttccgtacactgtataaaaaccctatactgtatgaatcgacagtttagggtgtgttatcatgacggcggaaggccatctcttcttttcaatcgcctgcgcagtatttgccaaaaacgcagagttaacgccggtgctggcgcagggcgactggtggcatattgtgccctcggcggtattgacctgcctgctgccggacatcgatcacccaaagtcgtttcttggccaacggctgagctggatctcaaagcccgtggcgcgggcctttggccaccgcggcttcacccacagcctgctggccgtctttggcgcgctgacgctgttctatctgaaagtgcctgacagctggattgtcccggcagacgctctccagggcctggtgctgggctatctcagccacattctcgccgatatgctcacccccgccggtgtgccgctgctgtggccctgtcgctggcgcttccggctgccgatccttgcgccgcgcaagggcaatcagctcgaacgcgccttgtgtatggcgctgttcgtctatgccgtctggatgccgcagacgctggcggacaacagcgcgatacgctggtcatccggggtgatcaattccctgcagatcaccttcaatcgctttataagtcaccagagtgggcgataaagcggcggaaaacgccatttggttataacccattccatttgaatataagtccttgataacgccttctgctaaccttgccgtcataagagctggttatccaccagcccaggttataaaaatatcaggagaacggggatgaactttccattaatagcgaacgtagtcgtgttcgccgtattactgtttgcgctggggcaaacacgccataaacagtggagcctggccagaaaagtgctggtcggtctggcgactggcgtggtatttggtctggcgctgcagctgatctacgggtctgacagccaggtgctgaaggattccatccagtggttcaatatcgtcggcaacggttacgtccagctgctgcaaatgattgttatgccgctggtcttcgcctccatccttagcgcggtggcccgcctgcacaatgcctcgcagctggggaaaattagcttcctgagcatcggtactctgttgttcaccaccctgatcgccgccctggttggcgtgctggtgaccaatatgttcggcctcaccgccgagggtctggtccagggcagcgcggagaccgcccgtctgaacgccatccagagcaactatgtggggaaagtagcggatctcagcgtcccgcagctgatcctttccttcgtgccgaagaacccgtttgctgacctgaccggggctaacccaacctccatcatcagcatcgtcattttctcggcgttcctcggcgtcgcagcgcttaagttgctgaaagaggatgtggaaaaaggccagcgcgtgctgaccgcgatcgataccctgcagggctgggtaatgaagctggttcgtctggtcatgcagctgaccccttacggtgtgctggccctgatgaccaaagtggttgccgggtcgaatttgcaggacatcatcaagcttggcggcttcgtggtagcctcgtatattgcgctgggtattatgtttgtcgtccacggcctgctgctggcgattaacggcgtcagcccgctgaagtacttccgtaaagtctggccggtgatcaccttcgcctttaccagccgctccagcgccgcctccattccgctgaacgttgaggcgcaaacccgtcgtctcggcgtaccggagtcgattgccagcttctccgcctcctttggcgccaccatcggccagaacggctgcgctggtatctatccggcaatgttggcggtgatggtcgcgccgaccgtgggcatcaacccgctggatccgatgtggattgccaccctcgtgggcatcgtcaccgtcagctcggcgggcgtcgccggggtgggcggcggcgcgaccttcgccgcgctgatcgtcctgccggcgatgggcctgccggtgaccctggtagccctgctcatctccgtcgaaccgctgatcgatatggggcgtaccgcgctgaatgttaacggctcaatgaccgccgggacgctgaccagccagtggctgcgccagaccgacaagtcgatcttcgatagcgaggaagaagccgaactggcgcatcgctaaacggcaagcacaaaaaaaccgctgatcattcagcggtttttttatttctgcagccgactcaggcttcaatctcaccttcctgacgcacctggttagcccagcgctgcgccgactccggcacgctgaatgccggtgagcgacggaaatgctcccccatcagcagaaaagcgacatacttcccgcgcaaaatccagacatcgcgaaaatggtccattttcacggcatgttccggaggcgcaggctccacgcgcggcacgtagctaatgacagggcgattttgttggcgcaatggtttcataacaaatggattcactaaacatagcgggaaacagaaacctctatcatagccgattgtggccccgttcgtcgccccttcgccgccgatgcgcattttaggataactccctgccccctcgccgggcgcagacagcgtaatgttctatagttagaagggttttggtctatcaacgaccacttttagcaatgaaagcaggagacgagtaatgtctgataagcacccgaaccctcaccaacagcaggcaccggtccacgacagcgaggaagcgcagccgggtctcgattcgctggcgccggacgatcgggagtggcgccccacgccgaaacctaccgctccgggcgtcgaacccaccgccccaggcagcctgaaagcgcccgatactcataacagcaaactggattccctggaggcgcaacgcaaagggggggaagattttccgctgaccaccaaccagggcgtgcgcattgctgacgatcagaattcgctgcgcgccggtagccgcggcccaacgctgctggaagattttatcctgcgggagaagatcacccactttgaccacgagcgtattccggagcgtatcgttcatgcccgcggctctgccgcccacggctacttccagccctacaaaagcctggctgcgttgactaaagccgattttctttcgtcagccgataaaatcaccccggtgtttgtacgcttttccaccgtgcagggcggcgcggggtcggcggacaccgtccgcgatattcgcggcttcgctaccaagttttacactgacgaagggatttttgacctggtgggcaacaacacaccggtcttcttcatccaggacgcgatgaagttccccgactttgtccacgccgtgaagcctgaaccccactgggccatcccacaagggcagagcgcccacgatactttctgggactatgtttccctgcagccggaaacgctgcacaacgtgatgtgggcgatgtcggatcgcggcatcccgcgcagctatcgcaccatggaaggcttcgggatccacaccttccgtctgattaatgccgagggcaaagccaccttcgttcgctttcactggaaaccggtcgccggcaaggcgtcgctggtgtgggatgaagcgcagaagctgaccggccgcgaccccgattttcatcgccgcgatctatgggaggccatcgaagccggggactacccggaatttgagcttggcctgcaattgatccccgaagagaatgaatttgcttttgacttcgacctgctcgatcccaccaagctgatccccgaggcgctggtgccggtgcagcgggttggcagaatggttctcaaccgcaacccggataacttctttgccgaaaatgaacaggcggccttccatcccggacatatcgtcccgggcattgatttcagcaacgatccgctgctgcaggggcgtctcttctcttacaccgatacgcaaattagccgcctgggtgggccgaacttccatgaaatccccatcaaccgtccgacctgcccgtatcataatttccagcgtgacgggatgcaccggatggacattgacaccaatccggccaactacgagcccaactcgattaacgacaactggccgcgcgagacgccgcctgccgccaaacgcggtggctttgagtccctcgccgagcgcgtcgacggcgaaaaaatccgccagcgcagcccttcgttcggcgaatattacgcccagccgcgtctgttctggctgagccagacgccgattgaacagcagcatattatcgatggtttcagcttcgaactcagcaaagtggtccgcacctggatccgcgagcgggtggtcgatcatctggcccacattgatactaagcttgcggaagcggttggggcgaacttagggatcgaactgagcgacgatcagcgcaacattaccctgcccgccccggtcaatggtgtggagaaagaccctagcctcagcctctacgccgatgccgaaggagatgtaaaaggtcgcgtggtggcagtcctgctcaacgaacgcacctcagcgcaggatctggttcagctcctgcaggcgctgcaggcccagggcgtgcacagcaagctgctctactcgcgaatgggcgaagtcattgccgacgatggttctccgctgccgatcgccggcaccttcgccggttccccttcgctgacggtggatgcggtggtggtgcccggcggcgacctcagcgccctgagtcagagcggtgacgcgcgctattacctgctggaagcctataaacatctgaagccgatcctgctggcaggggatgcgcggcagctgacgtccgttctgcatgttccgacccagggtgaagagggggtcatcgtcaccgatgcgctcgacacgccagcggcggacaaactgctcgccctgatgacggcccaccgcgtgtggtcgagaagcccgaaaatcgccgctattccggcgtagtaaaaagcccggcacgctgtgccgggcttgattcactttcactttcccccgtcgggcttacacgtcgcggtaggttcccagacgataaccccggtcggccaccgccgctttcagcgaggcagatgtcagcacatcaagctcatccagtcgcggatagcagtaggcgctgcccataatgatccgatcgacataagccggatgacacatcacctccagggagcgctccccgcgggcgatggaggcatcaagcgtctgcagaaacagttcctcagagaccgcttcgccgtaaaactcgctgctgaagccggcgctgctgcgcgccgcctgctggtcgagctcactctgcgccgccacctggcggtcaatgcgtaacgcaatgcccttctcgcgggcaaaggccgcgacgatgggataaatctgggcgaacatatgcacatggtgatggctgtcgatatgcgtcggctcatggccgaagagttcgacaaaacgacggtactgacacgccagctcgtgggcgacctcttccagcggcaggctatcttcttccgcctgctgccagatccatttgcccagccggccatcgcgggtcaatcccggcatggccgacaacggctcgcccagcgtcagcacaaagtgcataccgaccgccagctccggagtactgcggctcagctgggcggcgtggtcaatagccgcgccgttgaccagcgcggtggtcgatgtcaccacgccgttgcgacaggcctcgataatgccgtagttctgccctttactgaggccgaagtcgtcggcattgacgatcaatacgcgttccatttgctactcccgttacgattttagtttttcgatcgtcgccgcaaagttcggcagccatttttcatgcgccagaatcatctcccgcgccagctgttcggcgtcacgatcggaatggatcagcgggcttaagttcagcgccaacaggacatcgttcagctcaccgctgatcgccgcctggctggccgccacttcgaaccccttgatggtgtagataagccctaacaccttctcatcgaaatgagtaatgcgcggcgtcggcttcgcgccgtcgcggcctaaggtgcagctcatctctaccgcccagtccgccgggatattatcgacatgaccatgatgcgggatattcacatagtgctcagtctgcttgtcgttatagatggcattgattacttcgcaagcggcatcagagtaataggccccgccgcgctgctccagctccttcggcttaacgttaagatccgggtttttatacagctcgaacagctgtttctccaccttctgcaccacctgggcgcgcgcaccgcctttgtagtactcgcccatctcaatcgccagcatctcttttggcttaaagtagtagagcaggtaagagcatgggatcaggcgcagggagcggatcagcccttcgctaaacggcaggtcgaagatgtttttcaccgagttcgcggtcagacggccggaggccacgccgtccagcagttcatcgaagcgcgagacaccgttaaccagcacgtcgcggacgaacaccaggtggttgagaccaaacaggtcgatattcagctcatcgctcgggctcagctgcagcacgtcggtgatgaacatcttcatgccgataggaatgttgcacacgccgataaagcgtttgaaattggtgtggcgatagaccgcctcggtgaccatgcccgccgggttggtgaagttgatgatccatgcgtcggggcaaatttcctgcacatctttcacgatgtcgaagatcaccgggatggtgcgcagtcctttaaacaacccgcccgccccgttggtctcctggcccaggtagccgtgactcagcgggatgcgctcatctttttcacgcgccttcagctggcccacgcgcagctgggtggtgacgaaatctgcgccctgcagcgctgcgcggcgatccagcgttttatagactttcatcggcacgccggctttttccaccatccgctggcacagcgcgtggataatatcgagcttctcctgtccctcttcgacgtctaccaaccacagttcgcttaccggcagttcatgataacgtttcagaaatccttccagtaattccggggtatagctgctgccgccgccaatagtgactacttttaatttctggctcatctttttctcccttaggcgctgcgcctggacgcaggccgctctccgcaacaatgcggacagttaacttgaatgattttcggtataaccctggcggcgagcgccgcgcgggtttaattaatactggtcaaatgtttgcgataactgctcggcgtaaacgacgtcagttttttaaaggttttaataaacaagctcgggctactgtaacctgattcatacgcaatatccgtcaccgaataattggtaatttccagctgttttttggcaaagttgatacggatatcattaattatctgcatcggcgttttaccataatagcgctgggtcgcccgggttaaatattcctgcgtttttccggataagcgaaccatattttcgagagcgccttcaccgaatttcagcttatcatgcatggcttccacggtattttttaaccattgcggcgtcacgtcggcaaccggctcttcacgatagtggcgtaaacggttaatgacataaaaggagaccagctcgataaattcgtcaaattccgtttcgcgaaaattgagtgaggcgatgaccgactcaacgtagccgagaaaagcgctctgcacggcgtagacttgcgaagccaccagaccaaacggcagcagcggcaggtagtgtttctcaaagaagcgtctgctgatgccgacgttaaggatgcgcgtcgccccgaactcgtaaaagctctggtggtgcgagcccatcgggataaagacgaaatccccgcgctccagcagcacccgtttgccattgatctcctggtaatagcgcccggttaacaccacggtaaattcgtagtaatcatgctggtgaagcccgctcacgctttccgttttgttatagatgaccacatgaaagttcttcccgttgaacagctgttgttctctggcggtactgatctcggtggtcatcattctgggctgcctcatcgtcgcgatggcctattgtaccttctcgtgcagctcaatcaattcggccaccagctcacgagccagcatggaggtcatcagatggtcctgggcatgcaccagcaccaggctgaccttcattttcccttcgccctcgtcgctttcgataagctgggtctgcacgcgatgcgcctcgctcagcgcctggcgcgactgctccatcatcgctttcgctgcggcaaagtcgccctgcttcgcctgcttcagcgcggcataggccaggctacgggcttgtccggagttgataatcagccccatcactacctcttcgaggtcattttccggggtctctaccgcgtcgatgttgtccagatcaaacataatatttccctcatttatcaggcggtacgggacgctgcccgtaccgcgcggtatcagaatttcagtgcgttagcgatgtcttcttcgctctcttcctgctcgataacggtctgcgctttattcgacagcaccacaaacggcaggtagaccagggtagcgacgccaaggttgaacagggccaccagcagggcggcaacgctgccgttactgttaaagaacgctcccaaaccggtcggcatagtccacggcgccaggttggtcaccggtgggataatccccaggctgtaggccgccagcgtaatggccgccagaatcggctgaaccagcacgaacgggatgaacatcaccgggttcatgatgatcggcagaccaaacagaatcggttcgttaatctggaagatgcctgacggcagcgccagcttggcaacctgacgatggtcagcgcggcgagaagcgataaagatggcgataatcagacccagcgtcgccccggagccacccagcaggatgtaggagtcgagcatcggcttagcccagaagtggaactgtttgcccgcttcgatggccgcatcaacagagccgtactggttgtacagcgcgatgttttccagcgcccacggcgtcatgatgccgttatccagggcggtaagcgccagagaaccgtgcacaccgaagaaccacagcagagagttaaagataacgtatgcccagccaaccacgctgcccatcgccgccagcggcgtcgagatagagtccatgatgatctggtggaagttgctgccatagctcgccagggcccacgagataatgccgaagatggagaggatcaagaagcccgggatcagcgctgagaaagagcgtgataccgaccccggcacgctgtccggcagtctaatcacccagttgcgacggatcacgaaggtgaacagttccgcaacgaccagaccgataatcatcccggagatgatgttctgcccgcccagccagttggcgcccaccgcataggcttcgcccacgctatacggggtcacggtcatgaaggccgccaccgccagcaggccagctgccatcgggtcaactttgcgctcttccgccaacgcggagccgataaagaacggcgccattagcgacataatcccgagggtgccgttatagacgtttccgccaatagccttaaagccgtttaaggtttcaatggtggaggcatccaggcgaatgcccatggaataaaagaaagagccttcgccgaagctcagaaaaacgttgttaattaacacaaacatggccccggcgagggtcaacggcattaatttaataaatccattttttattgcattaatatgcggctgctttcctattttcactgcaaaaggaaggagtaccttttcaagcgaatcgatcactttactcatagtcaatacccttaaaagccgcaataaactattacggcgatgatgtatgaaattactctttgacgggaaaataaactcattattttttgacgtccggcaacaggcagccgccaggcgtcaaaatacatcgagttttaaaagttaaaattattgtgctgcagctttcttaatagccgcgacggcggctttcaatacccctaaaccatcaactttgccatagagaagggagtcgataacttcaaccggtttattcggcagcaggcgctgaatttccggtaacatatacgcaatttgtggccctaataatactacgtcggcttccggccctttttcgcccgcgagggtttcgggataggcttcaataatgaccgggacttcatatttttccgcctgcgcccgcattttggagaccagcagtgacgtggacatgcctgccgagcagaagagataaatgtgtttcttttccatgaacgcttcctcaatgtgtgagaccagggccttcagtaaccgctgagagccggtaagactggtaacatccggttaattctgtttatgagttgagtatacggcaagctgagccgccaggataattcgctgttgaacagaattgtctctcattgacctccggttttgactaccctcacattttcatccaaataattcgcgcaattaaataagcatcatgactcacaaaaaagcccgaccagtggtcgggcttacgtagaagtcagtaaacagtaggaagcttacctggcgttgcgcgggtcggtatcatactcggcgcaggtctggtagccggagttcatgacgtgacccgtttcgtcgagggccacaaagtaggtttcaactttaccatctcgttgaccgaggatataggtctggcaggtgccgcgggcatggaccatggtgacttccgttgaaggtttgccggcgatctgcatcacctgctgacgcgacatccctttcttcacatctttcaccaccggctgggtaaactggtctttggtacgatcgtaagcggtacagcccgccagtaaggttaacgcgacggtgacgcccagtattcctgctaagcttttgttcattttggttcctcttttctactgtgtaacgataagcctggaataaatagtgttatttttcaagccgaacagcgaaatcatgtcaggttatgttattgcgtaaacaggattgatctgccgacgtcggacggcggcgcaatgcgcggtacagcatctataatgaaaacctatgtcattgattgccttcttttccggcagtcaaaaccccggtccttgtcgtttcagcggcaaagaggtagctttaagccaacagcttgccaaacagattcactttcggagggcgcgatgacgctacaacaagagattattcaggcgctgggcgcaaagccgcagattgatgtcgcaggcgagatccgccgcagcgtcgatttcctgaagtcatacctgcagacctacccgtttattaaatcgctggtgctgggtatcagcggcggtcaggactccaccctgacgggaaaactgtgccagatagcgattaacgaactgcgtgccgaaaccggcgacagtagcctgcagtttatcgccgtccgtttaccctatggcgtgcaggctgatgagcaggactgccaggacgccatcgcatttatccagcctgaccgggtgttgacagtcaatattaaagctgcggtgctggccagcgaacaggcgctgcgcgaagcaggcatcgaactgagcgacttcgttcgcggaaatgaaaaagcccgtgagcgaatgaaggcccagtacagcatcgccggaatgaccaaaggagttgtggtcggtaccgaccatgcggcggaagcgattaccggctttttcaccaaatatggcgacggcggcaccgacatcaacccaattttccgcctgaacaaacgtcagggcaaacagctgctggcccatctcggctgcccggaacatctgtataagaagctgcccaccgccgacctggaagacgatcgcccctccctgccggatgaagtggccctgggtgtcacctacgagaacatcgacgattatctggaaggcaaaacgctggacccgagcatcgccaaaacgatcgagggctggtatctgaaaaccgaacacaagcgtcggccgccgatcaccgtctttgacgatttctggaaaaaatagtctctccccccgccccggcctgcgccggggttattttttgtccttttcgccgcaaaaatggcctgctatactggatggatagacagtaccaggagttattgtggccagaaagcaatcagccccgcgtctcgagtttgaggcggcggcgatctatgaatatcccgaacatcttcgcccgtggctggaggcgctgccgaagctgccgggcgtctatcagtttcacggcgacagcgacacgatgccgctctatatcggtaagagcgtcaacctccgcagccgggtgttatcccacctgcgcacccctgaagaggccgcgatgctgcgtcagtcgcggcgtatcacctggcagcgcaccgctggcgagctgggagcgctgctgctggaggcgcggttgattaaagagcagcagccgctgtttaacaagcggctacggcgtaacaagcagctctgcgcctggctacttgcggacgaccggccgcagattgtctatgctcgtgaggttgatttctcgcaccagcagcatctctatggcctgttcggcaaccggcgggcggcgctgcagatgctgcagagcctcgctgacgaacagcgcctctgttatggcctgcttggtctggaaccactcagccgcggccgcgcctgctttcgctccgcgctgggccgctgcgccggggcctgctgtggaaaggagagcgtggaggcgcacagagagcgcctgctggcgcagatgagcagactgcagctggtgtgctggccgtgggcggggcccgtggcgctggaggagcgcggcccggacatgacgcagtatcacgtcattcataactggctgtggctgggcgccgttgaatcgctcgaccaggcagcggagttgacccgtctgcccgccggatttgaccaggatggttacaagatcctctgtaagcctttgctcagcggagactatccgctgcatccgcttggctgagaagccaccgataaaaaaccgccggccctgcccaacgcctgatggcattattgggcaagaccggcggtcttgattcagtgcgctacattattcagcaggtgcaggcattttacctgccggcgcgttgcgttctgtcagatgcttctcaaaattagcattgaactgttttttctgctctggggtcagaatgttgtagatcttgttctgcgtttccaggcgggacagcgccatcgctttatgctgcgcttccatcttatcgatctgcgcttccgccttcgccttatcgaaggtgtcgctggcgatcagatcgtgcatcgcgcggcgttcttcaagggacggacgtttcatattttcgcgctggctcttcatgatgtcgcggatctgctgcttctgcgcatcggtcaggttcaggcctttaaacatcatgtcatgctgacccgggccgcctttatgatgcatcatcatcggcttgctgtcgctcggcgcggtggtggtatcggcggcgtgtgccaggttagccgcgcccagagccagagtagaggcaacaaacagtgcagtgagtttcttcatcattcaatccttactttacgttattcttacggcgcgttgccgtgttgacgagattaactttacgacgttaatcgtcaattagtcagagcaagagtaaaacaatgaaagtgtaaaaaacagtttctcgccaattatggagaaaataaggaatttagccgaagaattgcaataaaaaataaataacttactgttttgcagagaaattatggagagtataaaggaggggagattaaaaacaaagcattttaccaggaataatctgcaaatttacactggggcacgaaaaaataagatggcgaaaaaagacgcgcgaaataaagcaggccgcccggcggacggcttgccctcaggataatttctccagcatcaggccggcgcgcagtcctttcgccaccgtcgggttaggaaacagaacatactccggctcaggccccaccacataccgcgtctcgccctcctccgccagcagcgtgccgggttcgaagggggtgaagttcagcgtctgatccgccatatgcaagcggaaatcatcgctatggcgggttagctgctgtaccacccggtagcgcagcggcgctggggcgtcggcaatggccagatcccccaccagcagccgggagagcgcccgctggacggcggcaaactgcgtcagatcgttttcccccaacggcagcgctttgcccagctcaagggtgcaggccagcgccgcgaaccgttcgcagctgaagtgggtgaaggtcccgccgggctggcgatgaaacaccagcgcctccagcccggcgccgcccagccagtgaagaaaatcctcctcccacggcgtatcgcgggccgggagcacgccgaagcgcggatgtagcgacccgcggatcgcggtatgcagatcgaggtgccagcgcggaccatcgtggtcgcgataaaagcgggccaccgcctgctccagccgctgcgcccgctgcgtctcctcactgagcggaaactgccgccagcgctcgccaaacatgcggttcatatcgctgtgcagatagcgcttattcgcccgcagcgctggtgggttgccgacgatcaccagcagccgccagcgcagcgggagcgcctcccggaccagtcgctgcaccagctggtcgactatctccaccggcgccgtttcgttgccatgaatggcgcaggagagtaccagcccgcgctcgcagcgcgcatgcggcgtcagctcaaggatcccttccccgagccagtgccagcggaaatgggccgtctcgccgtgaaagtgatggggcaatcgccccgccagggttaatgccagaaaatgttccaccgcgcccccttattgctgaaatggataaaccgaaccgagctgcaggatctgggtcaaccgatccagcgcgtcgcgcccttcccgcagcagctgcgggtcggcgaggtcggcctgggtgagacgatcgcgatagtagcgatccacccagtcattgagggtggcaaacagcgtatcgttcatcaggacgtgcggattgaccgcctgatactcctcggccgtcaacaccacccgcaggcgcaggcacgccggaccgccgccgttggccatgctctcgcgcagatcgaacacccgcaggtcggcgatggggttatccccggccagcagctcattgaggtattcccagacgccggcatgctcctgcgcttcctgaggcaggataagcgccatgctgccatccgcccggctcaacagctggctgttgaacagataggtggcaaccgcctctgccaccgagacccggctggcgggaaccaccagcggcgtaaaacccggcacccgctgcgccagctgctggagaagcgcggtctggtcggcaaaggcctgctcatggcagaacaggacctgacggttgctcaccgcgatgacgtcgttatgaaaaacccccgtgtcgatcgccgccggatgctggcgggcgaagatcagctggcggggattgacctgattgaggcgcgctaccgcctggctggcctcaagggtttgccgcgccggatagcgacgcggcgcctcctcgctcccccggcggcggccatagacaaagagctggacgccgggagcgccatactcgccgccgagacgattatggttcgccgccccttcgtcgccaaaccaggccgaggcgggcagcgccgggtggatagcaaatcgcgtgcggtcggggaaaatcgcctgcagcagcgcctctgtggtcggtgcttcgctggcgcggtggaatttatcctgcagattcgccaccgtcaggtgcaccaggccatccagcgaatcggcggagggacacaccgtcgccgcgttcgccacccacatcgccgaggccgaactcaccgccgacagcagatccggctcctgctgcgccacccgggctaccacctgctcatcgctgccgctaaagcccagctggcgcagaagcggcacgttgggacgctcctgcggcgggatcaccgcctgcgggtagccagcgtcggcgagggctttcatttttttcagcccctgctttgccgccagctgcgggttagacacctgatagcgatgccgggtggaagcctcattgccaaaggagagcccggcgtagtgatgggtcagcccgggcagaccgtcaaagttgacttcgcgggcggtcatgacgcctccccggccagaaagtcgagccccgggctcaggctggcgggcagcgtcagggtcggcgattcaaggctggccatcggccaggcgcaataatcggcggcataccaggcccccggacgatggttaccggacgccccggtgccgccgaacggcgcggtactcgccgccccggtcagcggtttgttccagttaactatccctgcccgcgcctcgagcagcagtcgatcgaacctctcccgttccggggagattaacccacaggagaggccgaagcgggtagcgttggctaaggcaatcgcctcctcgaacgtgtcgtagcgccagaccccaagcagcgggccaaacacctcttcatcctcgacattggccacgtcgctcatgtcgacaatccccggcgttagcagcgacgtcccggcctgcaataaccgcggctccagcagggtgaccgcgccagcggcgacccgctgcagccaggcctgatgcactttctgcgcggcttgttcagagataagcccgccgagaaacggctgcggctcggcgtcccacgccgccgggatcagccgttggctcaccgtcaccagccgggagaggaagacatcgcccgcctctccgcgtcggaccagcagacgccgggcgcaggtgcagcgctggccagcggtaataaaggcggactggatggtcagatgcaccgcggcatccacgtcccgcggatcgtcgacgatcagcgggttattgccgcccatctccagcgcgaggatcttctgcggttgcccggccagctggcgatgcagatgaaaaccggtggttgagctgccggtaaacagcagcccgtcgatatccgtctggccgctgagcgcctcgccggtttcccgaccgccctgcaccaggttgagcaccccggcgggcaggccggcctgctgccatagtttcaccaccgcttcgccgctgcgcggggtgagttcgctgggtttaaagaccacggtattgcccgccaacagcgccggcacgatgtgcccgttcggcagatggccgggaaagttataggggccaaacaccgccagtacgccgtgcggccggtgacgcagcgtggcggcgccgtcgggcaggtcgctgtgctgttcgccggtgcggacgtggtaggccttcaccgagatcgccaccttgttgatcatcgccgtcacttccccggccgcctcccagcgcggctttccggtctcggcgccgataaccgccgtcagctccgccttactggcttccagcagagcggcaaacttttcaacgatcgcctgacgggcggcaaacggcagccgcgcccaggacgggaacgcctggcgggcagccgccaccgcctcggcaacctgcccggcatccgccgcctcgccctgccagacaaccttcaggttaaccggatcctgtttactgaaacctggcccacggccgggccgccactcgccgttaatccacagactcatgcagttttctcctcagggatcaggcgcaccatgcgcacctggtcgccggcatgacacttcagcatatccagttcgcgggcgctgagggtcagggtgtcgccatccggatcggcatgcaccagcagagcgcggaactggtgatactgttcattcgccaccaggcacagcggccagtcaccgagcggggtttcacctgcctcggtggtcaccagacggcttttgcggatcgcccgcacccggtcgatgtcgcactccagagtcgggccgccgtcgaaaatatcgatgtagttcaggtagcggaacccctctttctccagcaccgtccgggccggggcggtctgcggatgaaccttgccgatcaccgcctgtgcctcaggggaaaggaaatcgatatacagcggatgcttgggcatcagggcggcaatgaaagccttctgtccggtgccgcacaggtagtcggcacgggaaaactccatggcgaaaaagcgtttgcccaggctctcccagaacggcgagtagccctgctcgtcaatcaccccgcgcatctcggcgaccaccttctcattgaagcgctcgcgaaaggcggccataaataagaagcgtgatttcgacagcagatagccattgccctctttgcgccactgcgggtcgaggaacagggtacacagctcgctgctgccggtatgatcgttgctgagaaacagcgtcggcagcgcctgatagacgttgagctccttcgaggcatggacctgggtgccgacccggtagttataccagggatcgttgagccccaccgccacctcgatcgcgcagatgcccaccaccgcgccgctttcgctctcctccagcacaaagacatagccctgctcgcttttcggtagctcgccgcgccaggtctgctgcgagcgggcgatccgcgccgcgagggtcgcttcatccaccggcagcgaggtcagcccgccgccggtctccgctgccagcttcagcagcccgggcaaatcgcccggctccaccggtcgaataaccatcatgatgagactcctgccacgaaacgcgcgcaggcccgctcgacgcgatccagcccgctgttcacctcttcttcactgacgttcagcgctggcgcgaaacgcaccacgttggcgccggcgatcagaatcatcaccccctcttccgccgccaggttactgagggttttcgccttcccggcccaggcgtcgtttagcacgcagccgagcagcagtcccaggccgcggatctccttgaacaggccatagcgggcgttaattgcctgcaggcgttcacaaaaccactgatggcgctgtctgacgccggagagcacttccggggtgttgacgatcgacagcagttcgccggccaccgccccggccagcgggttaccgccgtaggtggtgccgtgggtgccgacggtcatcacgctggcgcaggcctctgtcgccagcagcgcgccaatagggaaaccaccgcccagcgctttggcggtggtcagcacatcgggcgtcacgccgtagtgcatataggcatacagctcgccggtgcgcccgaccccggtctgcacttcatcgaaaatcagcagggcgttgtgctggtcgcaaagctgacgcaggccgcgtaaaaactcgacgctggccggcaccacgcccccttcgccctgcaccggctcgacgatcaccgcgcaggtctggtcattgattaaggcctttgccgactcgagatcgttaaatacggcatgctggatctgcggcggcagcggggcgaaatcccgggaataggccggctgaccgcccgccgagacggtgaacagcgtccgcccgtggaaagcgttctgaaaggcgacgatgccacttttctcgctgccaaagcgatcgtgggcatatttacgcgccagcttgagcgctgcctcattggcctcggcgccggaattacagaagaagacccggtcggcgaaggtagcatcgataagcattttggccagacgcaggatcggctcattggtgtagccgttgccggtatgccagaacttgccggcctggtcggtcagggcttgcaccagacgcggatgggcatgccccagcgcgttcacggcgatgccgccggcaaaatcgatatactctttgccctgctgatcccacagccgtgacccggcgccccgcaccggaataaacgccgctggcgcgtagaccggcatcatccattcatcaaagtggttacgcgtaattgactgagacatatcgacctcttccggtaaattaaaagtagcaataatgttaataaatatgagttattacgctgtaaatgtagattgcacggttcgtgccagccagcgataaaaatgcataaaccggatgagataacgcagaatcaatgagttacagccgaacgctattcagataaaatgcatatttagtgaataagtatccgacaaagggggataaacagtgattaaagaagataaattatgcaacggtaagatataattctgtaattgtgatcctctgcgaaatttatcgtagatatttgcccttttttggcgcgacatgcccgcaaaaggggcacccacggcacgctcatgcgcagcgattggcagaatgacgcatccggtggcagccagcctggcgaatttctgctaccatccctgcactattcaccttgcacagtggcagcgactatgaaattcgtctcttttaatatcaacggcctgcgtgcccgcccacaccaactggccgccatcgtcgaaaaacaccagccggacgtgattggcctgcaggaaaccaaagttcacgacgacatgttccctctcgaagaggtcgccaggctcggctataacgtcttttatcacgggcagaaaggccattatggcgtcgcgctgctgaccaaagagacgccgattgccgtccgccgcggtttcccggacgatggcgaagaggctcagcgccgcatcattatggcggagatcccgtcgcccttcggcaacgtcacagtgattaacggctatttcccgcagggtgaaagccgcgatcatgaaaccaaattcccggccaaagcggcgttctatcagaatctgcagaactatctggagaccgagctcaacaaagagaatccggtgctgatcatgggcgatatgaacatcagtcctaccgatctggacatcggtatcggtgaagagaaccgcaaacgctggctgcgcaccggcaaatgttccttcctgccggaagaacgggaatggatggaccgcctgctgggctggggcctggtggatacctggcgtcaggctaaccccgacaatcatgagcatttctcgtggtttgattaccgctccaaaggcttcgacgataaccgtgggctgcgcatcgatctgctgctggccagccagcctctggcgcagcgctgcgtggaaaccgggatcgattacgagatccgcgggatggaaaaaccgtccgaccacgcgccggtgtgggccaccttccggccataattcacgcccttctctcgcctcccgctgtgcggggggcagaatttcctgagcaaaatcaacaaagcgacggtaaaccattgtgacggtcgtcggaacaggatactgtcgcgcgcactttttgatgtccaccgcgtccagactgtacaggagcacctctcatgcaaaagaagccgtcatccggccattggtaaagggctgggacttctcgcgctggtggccacgctggccgttatcagccaccgcgtcggtctccacgatctgctgactcacctgcatctgcttcaggacaccctccgccatcagggcgcctggggatatctggtctatgctgcgctgtttatcattgccaccctgtgtctgatccccggcagcctgctggtgatcgccggcgggatgctcttcggcccgctaacaggctccttgctctcgtttgccgccgccaccctcgcctcttcgctgtcgtttttaatcgcccgctggcttggacgcgatctgctgcagcgctatgtgggccataccaccgtctttcaggcgattgagcgcggtatcgcccacagcggctgcgatttcctgatcctcacccgcctggtgccgctctttccctacaatattcagaattacgcctacggcctgacggcgatccgcttctggccctttaccctgatctcggccgtgaccaccctgccgggtctggtcatctattcggtgatggccagcgaactggcccgcgagggggtgaccctcgccttcgcgctcaaactgagcctcgccggcgggctgctgtttgccctggtgcagataggtaaacggtttgcccgcgcccgtcgcgtggcggcgtgcagtgaggaggtgcgccatgacccaacctgatcgccgtcacctccgccgcgcccggctggcccttgccgtcgtggtcgccgccgctctggccgcctggctgtggttccctggcgggcgtacctttctgcagcagagtctgacggcgttagcctccctggatccgcagcaggtcagagggtttatcgccgcctgggggccgcaggccgcgctggtctcatttgcgctgatgatcctccaggcgatcgtcgctccgctgccggctttcctgattaccctggcgaacgccgccctgttcggcgccttctggggcggggcgctgtcgtggttcagcgccatggctggggccgggctctgcttctgcatcgccagagcgctagggcgcgaagtggtggagaaactcaccggccgcgcggtgctgcgcagtgccgacggctatttcacccgctttggcccgcagacgatcctggtctgccgcctgctgccgtttgtcccgtttgacccggtcagctatgccgccggactaacctcgctgcgcttctggccctttatgctggccaccggcgtgggccagctcccggcgactatcgtctattcctgggccgggagtctgctcaccgggggcaccttctggctggccaccgggctttcgctgctttttgccctggcggtggtcatctctatcgccaaaaatatttaccgtgaacgtcataagagatcgtcgccatgagcttacccccgctggattctgtccccctgatccttcgtccgcaggcctggctgcaccgccggcattatggccaggtgctgagccccattcgctggtggggtcggatcccgtggctgttttacctggtttcgctgttcgtgggctatattgaacgccgccgctcgccgctggatccggtgctgcgctcgctggtcagcgcccgcatcgcccagctgtgccactgcgaattctgtatcgatatcaccagcatgaccctcgcggcgcggagcgggagccaggacaagctgctggcggtcgccgactggcgcagcagtacgctgttcagcgaaaaagagcgcctggcgctggcctatgccgaagccgccacccagacgccgccggcggtggatgatgccctgcgtagcgcgatggccgcgcattttgacgcccgggcgctcaccgagctgaccgccctgatcggcctgcaaaatttatcagcgcggttcaatgccgcgatggcgatcccggctcaggggttgtgccagatacccacctcttcctcgcagaataaggagtaacgatgcgccgtttgcgtgattacagcctctgtctgtgcctgctgctgctctggccgctggcggttaatgccgacgacagctggcggcagattcagacggaagcccacggacagaccgtctggtttaacgcctggggcggcgacccggccgtcaatcgctatctggcgtgggtcagcgaagaggtcaaacgctattacgcaatcgacctgcgtattgtgcctgtcgccgacgccgccgacgcagtgaaacgcatccagaccgaggcgcaggccggtcgtcgccagggcgggtcagtggatctgctgtggatcaacggcgaaaactttcgcacgcttaaacaggccaacctgctgctcaccggctgggccgaatcgctgcccaactggcgctatgtcgatctgcaaaagccggtacgggaagatttttcagtcgccaccgagggcgcggagtcgccgtggggcagcgcccagctgacgtttatcgcccgccgcggacaaacgccgcagccgcccaccagcccgcaggcgctgctggccttcgccagagcccatccgggcagcgtaacctacccgcggccgccggacttcaccggtaccgccctgctggagcaactgctgatcgcgctcaccgaccagccagccgccctgcgccagccgccgcagccggcgaccttcgcggcggtcaccgccccgctgtggcgctatctcgatgcgctgcacccggccctgtggcgggcgggcaaggatttcccggcgtcgccggcgcggatggacgccatgctcaaccagggcaccctccgcctgtcgctgacgtttaacccgctgcacgcccggcagaaagccgccagcggcgaattaccgacggacagctacagcttcggctttaccgcggggaccctcggcaacgtccatttcgttaccatcccggctaacgcccgcgctgtcgctggcgccaaagtagtggccaatttcctgctctcccctgaggcgcaattgcgcaaggccgatgccgccgtctggggcgatccgagcgtactggatccgcagcgtctgcctgacggccagcgccaggcgctggcggcagccctgccgcaggatctgccgccggtgcttgctgagcctcacgcggcatgggttgacgcgctggagcaggaatggctgcgccgctacggtacccactgatcctgctggcctggggggcgatggcggcgatctatctgccgctgctccccgccgccggggaactggtgggcgctgcgcgctccccggcccactggcgggcgctgttcgccgacccgcagctgagccaggcgctggccgccacgctcgtctccacgctgttgtccgtcggcggcgcgctgctgatcgccctgaccatcgtcgccgccctctggccttcggcccgctggcggcggctggcttcccgtctgccgctgctgctggcggtgccccatctcgccctggcgacggcggcgctgctgctgttcgccgaagggggctggctctggcagcagttgccgtttctgacgccgccggtcgaccggtacggcattgggcttggcctgacgatggccctgaaagagagcgcctttgtgctgtgggtgatctatggcctgctgggagagaaacgcctcgccgaccaggcgaccgccctgaagagcctcggctacggccgctggcagtgcctgcgttggctggtgctgcccgccctgctgcccgccctcggcatggtgctgctggccaccaccgcctggagcctgtcggcggtagacgtcgccctggtgctggggcccggcaatccgcccaccctcgccgtgctggcgtggcaatggttaagccagggcgatgagctgcagcaggccaaaggggcgctggccagcctgctgctgatggcgatcctcggcgggctggcgctggtcgcctggggcgtatggcggctacagcgccagtaccagcccgatctgcgcggtgttcgtcacccgcatcctcatgccctgcccggccgcctgctggcggcgctgctgccgctgagcggtctgctgggcgcgctattgctggcggggctggcgcgctcggcgccgccgcagatggatgccctcggcaacagccttgggctggcgctggcggcctgcgccctcggcgcggctgtctgcctgctgtggctggcctgcggcccggcgcgaggcgatggctgggtctggctaccgctggtcctgccggccctgccgctggccgacggccagtaccggttggcgctgtatgcctggcttgacggtgactggtggaccgtcctgtggggccatctgctgtgggtggtgccctggatgctgtttattttgcgcccggcctggcgccagcgcgatccgcggctgacggttgtcgcccgcacgctcggctggggatccacgcgtattttctggttgctgaccctgccttcgctcactcgcccactgctgaccgccctggcggtgggcttctcagtgagcatcgcgcagtatctgccaacgctatggctgggggctggccgaattccgacgctcaccagccaggcggtggcgctcagcagcggcggcgaggcgcagacgctcgccgctcaggcgctgtggcaattactgctgccggcggtatgctttaccctgacggctctgctggcctggctggcaggccgctatcgacgaggacttcgctagtgctaaccgtaaaccatctgactctgagcgtgagacgccagccgctgctgcgggaggtcgccttttcggtagccccgggggaggtgctgacgctgatgggcccctccggtagcgggaaatcaacgctgtttgcctggatgattggcgccctgtccggcgattttcgcgcccgaggcgaactgtggctcaacgaacggcgttgcgatacgctgccgacagagcatcggcgcatcggcattctgtttcaggacccgttactgttcgaccatttcagcgtcgggcaaaatttacagctggcgctgccggagaacgtgcgcggcgaggcgcgaaaaaccgcggtggaggaagcgcttagccgcgccgggctggcgggcttcgccccgcgcgatccggccacgctctccggcgggcagcgggcgcgggtgagcctgctgcgcgccctgctggcgcgccccgaggcattgctgcttgatgagcccttcagccgcctggatgccagcctgcgcgccgggttccgccgctgggtctttgaagaactggcccgccaggccattccggcgatcctggtgacccacgatcgcgaggactgcccgccgacggggcgctgcctggcgatggagcgctggcaatgaaggacaatagcgtgcaaacctgcgttaccgcaaagaaatcggcgcctggcgagtggagaatacgccctccactttttaccgtcgggcatttcgatgaaacgtgtttctcaattgaccgcactcgccctgctcatggggcttgctgcttccactacctgcgccgctgaaaccatgccagcgctcactctctcccacctgcaacagcagcacggcgtggccatcgacacccggctgagcgcttattacaacggctggcagcagcgcgccaacggcccggaaggccatgagccgcaggccctcaatctttccgcccgctggctcggcgccatgagcgacgatcagctccgcgcctgggctaagcagcaccagctccagtccgatacccccatcgcgctgtacggcagcccggaggataacgtcagcgtcgcggcgcggctgaaacaaacgggtttcacccggctcagcaccctgagcgatgcgctgagccagaccgaccgtctgcaaaagctgccgcactttgaacagctggtctacccccagtggctgcacgacctacagcaagggaaagcggtcgccgccgccccggcaggcgactggaaagtgtttgaagccgcctggggagcgccgaagctctatctgctgagccatatccctggcgcgggctatatcgataccaatgaggtggagagcgaaccgctgtggaataaagtgtccgacgcgcagctgaaggcgatgctggcgaagcacggcatccggcatgacaccacggtgatcctctatggtcgcgacgtctacgccgcagcgcgggtggcgcagatcatgctgtacgccggggtcaaagacgtgcgcctgcttgacggcggctggcagacctggtccgacgccgggctgccggtagagcgcggcatgccgccggcgcagcagccggcgcctgatttcggcgcgccgatccccggccagccgcagctgatgttggataccgaacaagcccgcgggctgctgcatcgtcaggacgcctcgctggtcagcgtccgctcgtggccggagtttatcggcaccaccagcggctacagctatatcaagccgaagggcgacatcgctggcgcccgctggggccacgccgggagcgactccacgcacatggaggatttccataacccggacggcaccatgcgcagcgccgacgatatcgctgccctgtggcgccagtggaacattctgccgagccagcaagtggcgttctattgcgggaccggctggcgggcctcggaaacctttatgtatgcccgcgccatgggctggccgcacgtcgcggtgtacgacggcggctggtacgaatggagcagcaacccgcacaatccggtggcccgcggagagcgcggcccggaaagcagtcagtaactagccccgcctcagcgcgtcgccctttgtcggcgacgcgcgataccccgtttacgctgtggtcgttacccgctttaaggtctggtagccactgcagatgcgcgtcgccgtcgtcagccagcacagcgcgccaaacagccacgccagccaggcgaaatgcgccggaaacaggcagccgaggacaaacaacaggatggtctccgtcccctccgtcagtcccccgagatagtacagcgatttatgggcgtagccgggattggcgatctggtgcctggccgccagggcggcaaaagcgagaaagctgctgccggtgccgataaaggcaaacagcagccagccgcccgccagggcattgttcagcggatccgccagaataaagccgaacggcaccagggcgtaaaagagaaaatccagcgcaatatcgagaaagccgcccgcatccgtgagcccgcgccgccgcgccagagcgccgtccaggccatccagcaggcggttaaggagaatggccgccagcgccgcgccataccaccccagcgccagaaagggcagagccagcacgccgatggcaaaaccgaccagcgtcagcccgtccggtgagatgccggggcggtcaagggcgccggcgacagcgtttagcaggggtttaaggcgcggatgcaggtggctatcaagcacgaaggtctccagcagggttggcggttgtcagttacggtctatggcggtgataataggccatattcgtcttattaaccttgatgcttatgctaaaaatgattgatgttgtcgccgccattattgaacaggatggccagattctgctggcgcagcgtccgccccacgccgaccagccggggatgtgggagttcgccggcggcaaagtggagccgggtgaaagccagccgcaggcgctggtccgcgaactgcaggaggagatgggcatcatcgcccgcccggcttgctatatcgctagccatcagcgggaggtctccggccgccggatccatctgcacgcctggtgggtgccgcactttcagggcacgccgctggcccactatcacactcagctgcgctggtgccgtcccacagaagcgctggccctcgatctcgccccggccgatattcctctgctgcacgcctttatcgcccagcgccccaccctttccgtccgctgatccgcccgccgcctcgtcatcgcttttagttatgacgagcgggcaattataaattttgttgtcggctcaatttttccttgcttgcctaaggattagcggtgttatagtcggaaaatcggttttttcaaggaccgaatcataataaatacatgcaaccacaaccataaggggaactgatatctatggatcagacgtgcactctggaaggctttctcacccgcgttcaacagcgcgatcctcatcaaaccgaatttgctcaagccgtccgggaggtgatgaccaccctgtggcctttccttgaggaaaatccgcgctatcgtcagcttgctttgctggaacgtctggtggaaccggagcgcgtgatccagttccgcgtggtgtgggtggacgaccgcaatcaggtccaggtcaaccgcgcgtggcgcgtgcagttcaactcggccatcggcccgtataaaggcgggatgcgttttcacccgtcggttaacctgtcgattctcaaattccttggcttcgagcagaccttcaaaaacgccctgaccactctgccgatgggcggcgggaaaggcggcagcgatttcgatcctaaaggcaagagcgatggcgaagtgatgcgtttctgccaggcgctgatgaccgaactctatcgccaccttggcccggataccgacgtaccggcgggcgatatcggcgtcggcggtcgcgaagtcggctttatggccggaatgatgcgcaagctctccaacaacagcgcctgcgtcttcaccggtaaaggactctcctttggcggcagcttgatccgtccggaagccactggttacggcctgatctacttcaccgaagcgatgctcaaacgtcacggcctcggcttcgaaggcgctcgcgtggcggtctccggctccggcaacgtcgcgcaatacgccattgagaaagcgatggagcttggcgcgcgggtggtgacggcctccgactccaacggcaccgtcgttgacgaagcgggcttcaccaaagaaaaactggcccgcctgatcgacattaaagagcgtgcccacggccgcgtggccgattacgcccgcgaatttggcctcacctatcttgaaggccagcagccgtggtcagtgccggtggatattgccctgccttgcgcgacccagaacgaactggacgtcgatgccgcccgccagctgattgccaatggcgtcaaggccgtggcggaaggcgccaacatgccgaccaccatcgccgcaaccgacctgttcctggaagctggcgtgctgtttgccccgggcaaagcggccaacgccggcggcgtggcgacttccggtctggagatggcgcagaacgccgcgcgcatgggctggaaagcggaaaaagtggatgcccgtctgcatcacatcatgctggatatccaccacgcttgcgtgcagtacggcggcgaagcgaagcagaccaactacgtgcgcggcgcgaatatcgccggtttcgtgaaggttgcagatgccatgctggcccagggcgtgatttaaccacccctaactccatcccggcggcagcccgccgggatgcgtctcacgacgtcatcgtgatcactactttccccagatgctgaccactgtccagacaggcatgggcctcggcaatctccgccatcgggtagctggcgtagatcagcggcttgcatttccctgcctctagcagcggccagacgtggcggcgcagcgcctcggcaatctgctgtttctccgccgccgtccggccgcgcatggtcgagccggtgacggtggctcgcttgagcatcagagtctgaatatcaacctcatgagcgattcgcccgcccataaagccgatgatgaccagccgtccatcctttttcagtagcccaaggttgcgtttaaagtaagggccgccaacaatatccagaatgacgtccaccccttcatcgttggtcagctggccgattttctcggcaaaatcatctgttttatagttaatcgccgtagcatagggacgtagcgcaacaattttttcgtcctggccgacggtggcatagacggtcatccccagcgcgtggcacagctggaccgcggtggtgccaatcccgctggcgccgccgtggaccagaatgctttcgccaggctgcagcttacccagctggaagacgttcgcccagacggtgaagaaggtttccggaatggcggccgcttcgctaaagctgaggcccgccgggatcggcaacgtctggcctgccggcacggcgcagtattcggcatagccgccgccgttggtcagcgcgcaaacgcgatcgccgggcataaacgctgtgacctgcgcgccgaccttaacaaccacgcccgccacctcgaggccgggcacgggggtgacgccctcaggcatgggatacagaccctggcgctgcagaatatccggccggttgacgcccgccgccttcacctcaatgagcacctcatgctccccgatggtggggatctccccttcgcggatctgcaatacctccgggccgcccggttggctgatagcaatatatttcacgggtcctccttatcgcctgtgagagaaatggggcatcggcatcaggaaaagcgcagcgggcatcccctgctcaggggccccgcgtccaggctcttcccggctgtttagtgtagaccattggcctgactggcggagaagcggtggccgtggggtaacgcatcctcgcgaccaccggcgggttactgcggcggcggcgcggtatcgtctgccgcttttttgcctttcggcttccctttacctttgctgaacgacttcttcgccccgcccggcgccaccaggccgcggaactgacgcaccggcgtgctgcgcgcctgatcgatcagttgatacagcgtccccaccagcggctgcataaagtcctgatagcggcactgtttctcgctgatctgcgtcaacaccgactcccagtgggcggtcatgtccggtcgcccggccatctccggcagggaatgaatgagcgccctgccggcctccgaagagtggatatagcgcccctttttgctcaggaaaccacgcttgaagagcagctcgataatccctgcgcgggtcgcttccgtgccgaggccgtcggtggcgcggaggatcttcttcagatctttatcctgcacgaagcgggcaatcccggtcatcgccgacagcagcgtggcgtcggtaaagtggcgcggcggctgggtctgacgctccaccacctcgcccctctcgcacagcagttcatcgcctttggccaccaccggcagcggcgtgccgtcgttctcttcatcgcgctctttgctgccaagcagcgtccgccagcccgcctcggccagaaaacgcgccttggcgacaaacttgccgttggcgatctcaagatcaatctggcatttgcggaacactgcgtcagggcagaactgcatcagatactggcgggcgatcagggtgtacaccttcgcttcattatcggtgagcttcacctggctgctgcgggcggttgggataatcgcatggtgcgcgtcgacctttttatcatcccagcagcggttgcggatctccggatccactaccggctgcggcagcaggtccgccgcatggacggcaatcgcattcaacaccgcatggcggccagcgaagtgctcttccggcagatagcggctgtccgaacgcggataggtgatgagtttgtgggtttcgtacagcttctggcagatatccagcacgttctgcgcgctgaagccgaaacgtttggccgcctcaatctgcagcgccgacagcgagaacggtagcggcgcgggttcggaatcgcgcttatcgttatagccggtcacgattgccggctggccttcgatgcgcttaaccacatgctcggccagcggacgatgcagcaggcgcccttcttcatcctggtaaggttcgcaggcttcgctcggcacccaggtggcgacaaaacgctcctcctgcggcgtgacgatatgcgccttcacgtcgaagaaatctttggcgacgaaattttcaatctcttcatcgcgacggaccaccaggccaagtaccggggtctgcacccgccccaccgagagcaccccctgatagccggcgttgcgccccagcagggtgtaggcgcgggtcatattgatgccgtacagccagtcggcgcgggcccgcgccagcgccgacacgcagagcggcacgaactcgctgttggcgcgcagacggttgatcgcccgctccaccgcctgcgggttgagatcgttaatcagacagcgctgcacctgctgacgcttctccggcgccagctgtaggtagtcgagtacttcgtccaccagcagctgcccttctctgtccgggtcgccggcgtggataacctcctcggcgtcgccgagcaggcgcttgatgacattcagctgtttggtgaccgagggctttggctgcagctgccatttctccggcacaatcggcagatcgttgagattccaccgggcatagcggctgtcgtagatgtccggctgcgcctgctccagcaggtggccgatacaccaggtgaccacctgcccgttgccgcactcaatatagccatcgcctttgcggtgcggtttaggcaacacatcggcgatagcccgaccgagactcggtttttctgcaataaacaaccgcatcgaatcaacggatctcgatcatgggtcgcccgccgcgggcggtcaccagctcgccgatggcggccagcttaatgccgaactccgccgcggcggcctgaacttccgcctccgcctccggggtcaccgccagcagcagaccgccggaggtctgcggatcgcacagcagatcccgccactccgtcggcatctcgcccatgagatggccgtagctggcaaagttgcgcccggtgccgcccggcaccgcgccggcggcgatatagtcttccacccccggcagttttgggatatcggcatagcgcagctgcgcctgcacgccggccccgcggcacacctcgctgagatggccgagcaggccaaagccggtgacgtcggtcatcgccttcaccccgtcgatggcggcaaacgaggcgccggcgaggttcatctggcacatggtctccgtcgctaacccttgatgctctggcttgagcagcgattttttctctgcagtggtcagtacgccgatccccagcggtttagtaagatacagtttgcaacccgcctgggcggtgctgtttttcttgatgcgctcggtgggcaccacgccggtgaccgccagaccgaagatcggctccggggcgtcaatggagtggccgcccgccagcgcgatccccgcctgctggcaggcaaagcgcccgccctccaccacttcgcgagcgatttccggcgccagggtgttgatcggccagccgaggatggcaatcgccataatcggtttcccgcccatagcgaaaatatcgctgatggcgttggtggcggcgatgcggccaaagtcgaacgggttatcgacaatcggcataaagaaatcggtggtgctgacgatcgaggtgccattaccgagatcgtaaacggcggcatcatcgctggtttcgttgccgacaagcaggtttggatcgacaaacttcgcctgctcgctatgcaggatagtttccagcactttcggggaaattttacaaccacaaccggctccgtggctgtattgcgttaaacgaatggcttgctcgctcatggacatctcctgtcattgcaatcccgctatgttagcgcccaaacgccagggtggtaagtacgacagtctgaaatcgcgtatggttgctcattaagcagacaaaaagccgtttttgcgagacgcgacaattttttcccgaccattttcacttttacttaaagatgacagaaatgtgacagcacaggactgtcttctctggaatgattatgacgtaaggaaattctaatgaaaaagcgtgttcttgccctttgcctggccagtttcttctccgttaacgcctttgctctggttccccccgggaacgatgtcaccaccaagcccgatctctactatctgaccaatgcccaggccatcgacagcctggcgctgttgccaccaccgccggcggtgggcagtatcgcatttttaaacgatcaggcgatgtatgagcaaggacgtctgctgcgcaataccgagcgcgggaagctggcggcagaggatgccaacctcagcgcgggcggcgtggccaacgccttctccagcgcctttggttcgccgatcaccgagaaagacgcgccgcagcttcacaaactgctgaccaatatgattgaagacgccggcgacctggcgacccgcagcgcgaaagagaaatacatgcgcattcgcccgtttgcgttctatggcgtctccacctgcaacaccaccgaacaggacaagctggcgaaaaacggctcttacccgtccgggcatacctctatcggctgggccaccgccctggtgctggcggagatcaacccgcagcggcaaaacgaaattttgaagcgcggctatgagctcggcgagagccgcgtgatctgcggctatcactggcagagcgatgtcgatgcggcgcgcatcgtcggctccgcggtggtcgctacgctgcacaccaacccggccttccagcagcagttgcagaaagccaaagatgaattcgcgaaaaggcagaagtaacgtcatcgccgttgcattcccggatgcggcgcctggcgcgtcttgtccgggctacaaaaaccgcgattgattcgaatggtaggggttgtaggccgggtaaggcgccagccgccacccggcatagatgcggctccgagcctgctgccatcgcccggcggcgctgcgcttgcgcggccagccggacggttccctctccctccgggagaggaccagggtgaggggaagcactgcagtgtggttgtttatgttatctatggcttcagcgtagtttgcgctcccggttaatcgtctgcgttatgtcactcatggcgccgggagcgcacagggggcggcctgtcgccgccgccccctgtacccccgggctccggccagcaaaatcgccgctgcgcggtcccttcgacttatccctgcaggcttcgggtcgggccgaggcagcgtccctgcaaaacacggccctcagcccgcatccatgcgggctgccccggcctgccgggaacgtctcagcgattttgaggccgtcagcaccggcagtttcagcaagaaaagtgaataaattaacgacaggtcgtacgaacgtaggccgggtaaggcgacagccgccacccggcacaaaatcagctctgtgcccgctgtccttgcccggcggcgctgcgcttgcgcgggcctacagacaatcagagccggatgcgttggccgggtaaggcgccagccgccacccggcataataagcaccgactcagaatcgcgtcacaaacggcgcggtatccggcagggcaatggtggttgaggcttttagctgcggcgtccccagatagaggaagccgacaattttatcctgttcgcggcactcgaagccggcccgcaccaccggactctcggtcaatgctccgctgcgccagataccgttgaatccctgagccagggccgccatctgcatcgccatcaccgcgcagccagcggacatctcctgctcccagcgcggcaccttagggtggtcttcacagcgcgcgaccacggtaataatcagcggcgcgcggaacggcgcattgcgggctttctcaattcccttctcatcctggccggcctctctggcccctttttccagcaactggctgaagcgctcgcggccgtcatcggcgataataaagaagcgccacggctgcagggtgccatgatccggggcgcgcagcccggcgcgcagaatgttttccagctgttcgcccgccggggcaggttccgccaggcgggaagcgctgcggcgattaagcagtagatcgagagcatccatctgtataactcctgtgatgtcatttttcataaaattaacatgcacaaggattttgttacagcgcggtcggtgattcctgctgacaaccgacggctcactctttaggatagccagacgcggcggcccctgcggcctgccctttttagataacgttagggagaagacatgcgaaccctttggcgactgattgccagcttttttaaatggacgtggcggatactcaactttattcgcaaactggccctcaatgcgatcttcctggtgctggtgctggtgtgtatcggcatctggagccagttcagcagcaccaccagcgaacatgccgcgcgcggcgcgctgttgctggatattaccggcgtggtggtggataaaccatccgccagcagcaagctcggcgtgattggccgccagctgtttggcgccagctcggaccgtctgcaggagaactccctgttcgatatcgtgcagaccattcgccaggcgaaggatgaccgcaatatcaccggtattgtgctggatctgaaaaacttcgtcggcggcgaccagccatccatgcagtacatcggcaaagcgctgcgcgaattccgcgatagcggcaaaccggtgtatgccgtcggcagcagctacagccagggccagtactacctggcgagtttcgccaacaaaatctggctctcgccgcagggcgaggtagacctgcacggcttcgctaccaacgggctatattacaaatcgctgctggataagctgaaggtctccacccatgtcttccgcgtcggcacctataaatccgccgtcgagccattcatccgcgatgatatgtcccctgccgcccgcgaagcggatagccgctggattggcgaactgtggcagaactacctcaacaccattgccgccaaccgccagatcaccgcccagcagctcttcccgggcgcccagggcattatcgatggcctgcgtaaggtgggcggcgatacggcgaaatatgcgctggacaataagctggtggatgagctggcgacctccacggaagtggaaaaggcgctgaccaaacagtttggctggagcaaagcggataacaattaccgggcgatcagctattacgactacaacgtgaagacgccgtctgaccagggttccgccatcgcggtaatcttcgccaacggcgccatcatggacggtgaagagaccccgggcaacgtcggcggcgacaccaccgcagcgcaaattcgcgatgcgcgcctcgatccgaaaattaaggccatcgttctgcgcgtaaacagcccgggcggcagcgtaaccgcttcggaaatcattcgtgaagagctggcggcagccaaagccgccggtaaaccggtagtggtctcgatgggcggcatggcggcgtccggcggctactggatctccaccccagcggattacatcgtggcgaacccaagcaccctcaccggctccattggcatctttggggtgatcaacaccgtggaaaataccctcgggtcgattggcgtccacaccgacggcgtcgccacgtcgccgctggcggatgtctccagcaccaaagcgctgccgccggaagtgcagcagctgatgcagttgagcattgagaatggctatcagcgctttatcaccctggtggctaacgcccgtaagagcacgccggagaaaatcgaccagatcgcccagggccacgtctggaccggggaagatgccaaagccaacggcctggtcgacagcctcggcgacttcgacgacgcggtggccaaagccgccgagctggcgaagctgaaaacctggcacctcaactactatcaggaagagccgaccttcttctcgatggtgctggacagcctgaccggctcggtacgcgcctcgctgccggcggccattcaggcctggctgcctgcgccggtcgccgcggcggccgagacggtgaaagcggagagcgacaagctggcggcgtttaacgacccgcagaatcgctatgccttctgcctgacctgcgctaacatccgttaatacgcagcggctgccccgtctcccggggcagcctttttccctctcctgccaacactgccacaaagcccgcgaccgacgctgtattttttcctgcgtctctttatactgcgcctgtctacgaccaacctaagcgatgctatgcaaaaaaaatcgatttacgttgcctacaccggtgggaccatcggtatgcagcgctctgaacacggctatgtacccgtttccggccatctgcagcgtcagctggcgctgatgccggagttccatcgtccggagatgccggacttcacgatccatgaataccatccgctgatggattcatccgatatgacccccgaggactggcagcacatcgccgacgatatccgcagccattatgaggagtatgatggctttgtgatcctccacggaaccgacaccatggcgtttaccgcctcggcgctgtcgttcatgctggaaaaccttggtaagccggtcattgtgacagggtcacaaatcccgctggccgagctgcgttccgatggtcagattaacctgctcaacgccctgtacgtcgccgccaactatccgattaacgaagtggcgctgttcttcaacaatcgactgttccgcggcaaccgcaccaccaaagcccatgccgacggcttcgacgcattcgcctcgccaaaccttgccccgctgctggaggccgggatccatattcgccgtctcggtactccgccggcgccgcagggtagcggagagcttatcgtgcaccccatcactccgcagccgattggcgtggtgacgatttaccccggcatctccgccgacgtggtgcgtaattttctgcgccaaccggtgaaagcgctgatcctccgctcctatggcgtcggcaatgccccacagaatggcgaatttattcaggtgctggcggaagccagccagcgcggtattgtggtggtcaatctgacgcagtgcatgtccggaaaggtgaacatgggcggctatgccaccggcaacgccctcgctcaggcgggggtcatcagtggtttcgatatgacagtggaagcgacgctgaccaagctacactatctgcttagccagcagctggacgttgacgccattcgcgcggcgatgcagcaaaatctgcgtggcgaactcacccccgacgaggcttaaggaggacgtatggcacatcgagcgctgttactggttgatttgcagaacgacttttgcgccggcggcgcgctggcggttcctgaaggcgacagtaccgtcgaggtagccaatgcgcttatcgactggagcctggcgcgcggcgagcccatcgtcgccagccaggactggcatccggcggatcacggcagtttcgccagccagcaccaggtggaaccctacaccgagggcgagctggacggcctggcgcaaactttctggccggatcactgcgtgcagcacagcgaaggcgcggcgctgcatccgctgctcaagcagcaggcgatcgccgctgtgttccacaaagggcaaaaccggagcatcgacagctatagcgctttctttgacaacggtcaccggcagaaaaccgaactggacggctggctgcgtggtcaggggatcgtggagctgaccgttctcggcctcgccaccgattactgcgttaagttcaccgtgctggatgccctggcgctgggctacgcggtcaacgtcatcaccgacggctgtcgcggcgtaaatctgcagccgcaggacagcagccaggcgtttatggagatggccgccgcgggcgccacgctctataccctcgacgactggcgggaaactcaggcctgatccctccccccccggcgcccccgcgccgggtcttcttctgccgcctcgctattgtccataaattgaactctctcgcagtttcaacaggttattgctgctagtctggcaaggctgttttttcgccacgccatttccgtggcgtggttatttttatgtcaaagaggaaccactatgaaacgtttgcccttgctggcagccttgcccttgctttgcgcttccgcgctctctgcccaaccgctgatgtccggcggctattttaacggcggcggcgacgtcaccgccgggccgggcggtgatatcgataagctggacgtccggcagatcacccatctcaactactcgtttggccttatctataacgatgaaaaagacgagaccaatgcggccctgaaggatcctgctcatctgcacgagatctggctgtcgccgaaggtgcaggcggatctgcaaaagctccccgccctgcgtaaacagaatccggacctcaaagtcctgctgtcggtcggcggctggggcgcgcgtggtttctccggcgcggcggcgaccgcagaaagtcgcgccgtctttattcgttccgcgcagaaaatcatccagcaatatggtctggacggcattgacctcgactgggagtttccggtcaacggcgcctggggactggtggccagccagccggctgaccgcgacaacttcactgccctgctgaaatcgctgcgtgaggcagtcggtgagcaaaagctggtgactatcgccgtaggcgccaatgccgagagcccgaaaagctgggtggacgtcaaagcggtggccccggtgctgaactacatcaacctgatgacctacgacatggcctacggcacgcagtacttcaactcgaatctgtatgactccagccactggccgacggtcgccgcagcggataaatacagcgccgattttgtggtcaacaattacctggccgccgggcttaaacccagccagatgaacctcgggattggtttttatggccgggtaccgaaacgggcggtcgagccggggattgactggacgaaagcggatgcgcaaaacaatccggtcacccagccctattttgggccacaacagatcgcgctgtttgcctcgctgggctatgacctgagcaaagacacctatgtgaaatacaatgatatcgtgggcaaactgctcaacgatccgcaaaagcgttttaccgagcactgggacgatgaggcgaaggttccgtggctgtcggtgcagtccgcggagggcaagccgctgttcgccctctcctatgagaacccgcgctcggtagccattaaggcggactatatcaaggcgaagggcctcgccggggccatgttctgggaatatggcgccgatgaccagaatcagctggcccgtcagctggcggaatcgctggggatcaaacactaatcatggctgttccgccgcatcgtcggcaccgggaggcgtgacgcaggcagcatcgcctgcaatgcaggtatatcgcgccgcccgggataggttatgatgcctgttatccgctgcgccaggggttggcgcagcttaaccgtttgacaggaggcagggggccatggcctatatccccaaaaattacgcacgtctggaagtgggttaccgcgaaaaggcgctcaagctttttccctgggtgtgcggacgctgctcacgggagtttgtctactccaatctgcgcgagctgacggtgcaccacatcgatcacgaccactccaataacccggaagatggcagcaactgggagatgttgtgcctgtactgtcacgatcacgaacattccaagtacaccgaagccgatcagtatggctccacggtggtggcaggggaagatgcgcaaaagagcgtcggcgaggccacctacaacccgtttgccgatctgaaagcgatgatgaacaaaaagtaagcgaagcggctgaccgccggacgcggtcattcgacatgacgccatccggcgcgcggttacccgacgccggaacgtctcaccgccggccggcggtttattgcagtttaacggtggcgatcggcttcggcacgatgccaaaatcctctttcagctgctgtttgctcttcattaccatctgcccgctggtgtcgatggtcatgtgctgggcgtcggtgttataccgtgcctgccagagcatcaccagctgcaggctattttccttctgctccggcgtcagcgcgacgccatccggccattttcccagctctaccgccgtcgccagacgctgatacacttccggcgtcatactgtcgataatttgctcaatatccatcttccgctcacctccgcctggaataatttgctgaatcgtttcttcaacccttgatttgctcgccattttgctcatcggtgaagctcagcgatgccgagttgacacaatagcgctcgccggtcggctgcggaccatccggaaacacgtggccgagatgggcatcacagtttccgcaacggatctcaatgcgctgcatgccgtgcgaattgtcggtcagatagcgaatggcctccgcgcttaccggctcgtagaagctcggccagccgcagccggagtcgtatttagtctgggagttaaacagcggcgcatcgcacaccaggcagtggtacacgccatttttcttgttgtgcaacagccgtccggtgaaaggcggttcggtgccatgatgctgcgtcacgtaaaactgcatttcgctcaagccatttttcagatcttccggggtgggtttattcgccatgggcttacatctcgctttgcaatggactactttcgctccaattctaacaaaacattaacaatgaagcgtacacttttgttctaaacttatccggtgcccacaggcagccagataattgtgacttaaatcacgtttttatcttaaatgccctttaaaattccgcgcgcagcccccatatggaattgggctcaaagggaaagtgaggcaaatcaatcgcgcaaaggtctgctcaggattgatttgtcgcaatgattgacacgattccgcttgacgctgcgtaaggtttttgtaattttacaggcaaccttttattcactaacaaatagctggtggaatatatgactatcaaagtaggtatcaacggttttggccgtatcggtcgcattgttttccgtgctgctcagaaacgttctgacatcgagatcgttgcaatcaacgacctgttagacgcagagtacatggcttacatgctgaagtatgactccactcacggtcgtttcgacggtaccgttgaagtgaaagacggtcatctggtcgttaacggtaaaaaaatccgtgttaccgctgaacgtgacccggctaacctgaagtgggacgaagttggtgttgacgttgttgctgaagcaaccggtatcttcctgaccgacgaaaccgctcgtaaacacatcaccgctggcgcgaaaaaagtcgttctgactggcccgtccaaagacaacactccgatgttcgttcgcggcgctaacttcgacgcttacgctggccaggacatcgtttccaacgcttcctgcaccaccaactgcctggcgccgctggctaaagttatcaacgacaacttcggtatcgttgaaggcctgatgaccaccgtccacgctaccaccgctactcagaaaaccgttgatggcccgtctcacaaagactggcgcggcggccgcggcgcagctcagaacatcatcccgtcctctaccggcgctgctaaagcagtaggtaaagtactgccagaactgaacggcaaactgaccggtatggcgttccgcgttccgactccgaacgtatctgttgttgacctgaccgttcgtctggaaaaagcagcgtcctacgaagaaatcaagaaagccatcaaagccgcttctgaaggcgctatgaaaggcgttctgggttacaccgaagacgacgttgtttctaccgacttcaacggcgaagtttgcacttccgtgttcgatgctaaagcgggtatcgcactgaacgacaacttcgtgaaactggtttcctggtacgacaacgaaaccggctactccaacaaagttctggatctgattgcccacatctccaaataagttgagatgaaaaagtaatctgtaagagcgacttcggtcgctcttttttttgtctgcagagataggattgcacaatgataaataaaatttttgctctcccggtgaatgaaaccatttctcccgtgatctcccgtcgccagctggacgacctggagctgattgtcatcgaccatccgcaggtgaaagcctctgtggcgctgcagggggcgcacctgctctcctggaaacccgccggtgaagaagaagttctgtggctgagcaacaacaccccgtttaaacagggcgtcgccctgcgcggcggcgtgccgatttgctggccctggtttggtccttctgcgcagcaaggtctgccgtcgcacggctttgcccgcaatctgccatggaccctggaaggtcatgacgaagacgacagcggcgtcatgttgacctttgcgctccagcacagcgctgaaaccatgaagctctggccgcacgagttcaccctctatgcccgctttaagctgggtaagatctgtgaaatcgagctggaagcccacggtgaattcgagaccacctctgccctgcacagctatttcaacgtcggcgatatcgcggcggtgaaggtgagcggtcttggcgagcgctatatcgataaagtgaacaatgccgaagaaggcgttctgagcaacggcgtgcagaccttcccggaccgcaccgatcgcgtctatctcaacgccgacagctgcagcgtgatccatgacgacgcgctaaaccgcactatcgacgtggtgcatcatcatcagcacaatgtggtggcctggaacccgggcccggcgctgtccgtcagcatgggcgatatgccggacgatggctacaaaaccttcgtttgcgtcgaaacctgctgcgtaacccagccgcagaaagccagcgaagagacgccctctcgcctggcgcaaaccatcagcgtgaaaaaacgctaatagcaaaagccccgttggtaacggggcttttgcttttctttgccgtgaacgatgggttaaaccatatccagccgggtttttcgctgcggcggcggatagaggcggtccagctgcgcgagctcttccccactaaggacgatgtcgagcgctgcggcattctgcaccacatgctcaatactggccgctttcgggatcgccagcactcccggatgacgaatcacccaggcgagcagcagttgcgctaccgtaatcccccgcgcgttagccatattaatgatatcgctatgctgaaaaagtccatcgcgtaagcgccccgcctgcgccagcgggcagtaggccatcaccggcagactgtgctgctggcaccagggcaggagatcgtattcaatgccccgcgatgcgagatggtagagcacctggttggttgcacagtgctcgccatccgccgtccgccaaagcgcctgcatatcctcgatgtccagattagagacgccccagcggcggatcttgccctcagccaccagcttctccatcgcctcaaccgtctcctgcagcgggatatccccgcgccagtgcaggagatacatgtccagatagtcggtctgcagccggcgcaggctgttttcacaggcgcggtgcatcgccgctttgccggcatgccagggatagactttggagaccagcactacccggtcgcgcagaccgcggatcgcctggcccaccacttcctccgccccgccgtcggcgtacatttccgccgtatcgatcaccgtcagtccatggtcgatgcccgcccgcagtgcagccacttcctgctgacgctgcgccgcatgttcgcccatataccaggtgcccagcccgatggccggcactgccccctgctcgccgaagcgtactgtttttttcaccatcttctcctccttaaccgtatgcaccaccataaagcaaaacagggcgcaaggccctgttttgatgcatgaagcgcactgtaagaatgcacaatcagaaggtgtaggtgatcccggtggagatcagaccgctccaggatttatccaccatcggactgtcggtaatttcatccgacagacgcgtgtagcgcgccacgccgtaaacgctccagtcaccgaggaagcgatagttagccgacagttccagatatgggttccagctactgtccgggtcatagctgcgcatgccgctgcggcgcgactcgtgccgggagacaccatagtagtattcgttctgattgtcgctgttccactccacgccaatacccggcgtcagcgtcaggttaccgttggtgtaacggtacagccaggcgagatcccagttaataccgttgctgttatccagcgtatcgccggcaatcgtcgtgcgcaggaagccatagggcgtgttgtggacataagaaagaccggccatcacggtcgatttacgtttatccagtcgacgcatctgctcgctgtcgctgtcgcccggcttgaagtacattggcgaccagtaggccgtaatcgacagtttatcgttggtgtcattccacaggtagtaacccccgcccagaccgtggaaccagaagttttcgctctcataactaatgaccggcaccggatagacatccgcatcatattgcttatacggatgctcaacgacccctacgccagccccaagagtgaacttcccgtcggcatgcgccgcgctggcggacgtcgctatcagcacgccgagtgccagaagtttgattttagtcacaatccatattcccgttgtcaaataatcagcccgtgcagtgtaccgtcgtaggtctcatgcctcaaattctttacccgatatgacacaaatcgttcactttgccacccttctcttaccatccggtgacagcccgatgacaactttgcgtcccaacgaatcaaaaagcgccatgttcaggatgagttattgatatgtcattgaaattgattttctgcgccatgcaagatttctaaatgcatctacgcttaaatttagaaggtgtaattgccgggcacattcacgctaccccacccgcaacctggcataagggttgctggataccaggagagcgatgttcagcttatgtcttccgggggcccccactattcatatgaacggctctcaacctgtgctaaaaaacgaaaggacggcatgccatgaatatattcgatcactatcgccagcgctacgaagctgccaaggacgaagagttcacactgcaggagtttcttaccatctgccggcaagatcgcagtgcctatgccaatgcggcagaacgtctgttgatggccattggtgaacccgtcatggttgatacggctctcgagccgcggctatcccgtctcttttcaaaccgggttatcgcacgctatccggcatttgaagagttttacggtatggaagacgccattgagcagatcgtttcctacctcaagcatgccgcccaggggctggaagagaagaaacagatcctctatctgctggggccggtgggcggtggtaaatcgtcgctggctgaacggctgaaagcgctgatgcagcgcgtgcccatctatgtgctgagcgccaacggcgaacgcagtccagtcaacgatcacccgctgtgcctgttcaatccgcaggaagatgcgcagatcctccagaaagagtatggcatcccgacccgctatctcggcaccattatgtcgccgtgggcggccaagcgcctgcacgagtttggcggcgatatcactaaattccgcgtggttaaagtctggccatcgattctcgagcaggttgccatcgccaaaaccgaaccgggtgatgaaaacaaccaggatatttcagcgctggtcggtaaggtggatatccgtaagctggaacactatgcgcagaacgacccggacgcctacggctactccggtgcgctgtgccgcgccaaccaggggattatggagttcgtcgagatgtttaaagcgccgattaaggtgctgcatccgctgctgaccgccacccaggaaggtaactataacggcaccgaagggatctccgccctgccgtttaacgggatcatccttgctcactccaacgaatcggaatgggtgaccttccgtaataacaagaacaatgaggccttcctcgaccgcgtctatatcgtcaaggtgccttattgcctgcgtatctccgaagagatccgcatctatgaaaaactgctcaacaacagtgagctgacccatgcgccctgcgccccgggcaccctggaaacgctggcgcgcttttcgattctgtcgcgccttaaagagccggaaaactcgagcatctactcgaagatgcgggtctatgacggcgaaagtctgaaagataccgacccgaaagcgaagtcctatcaggagtatcgcgattacgccggggttgatgaagggatgaacgggctctccacccgctttgcctttaagatcctgtctcgggtatttaacttcgaccacgtcgaggtggccgctaacccggtgcatctgttctatgtgctggagcagcagattgagcgcgaacagttcccacaggagcaggccgagcgctatctggaattcctcaaaggctatctgatcccgaaatacgccgagtttatcggcaaagagatccagaccgcttatctggaatcctactccgagtatggacagaacattttcgatcgctatgtcacctacgctgacttctggatccaggatcaggaataccgcgatccggacaccgggcagctgtttgaccgtgaatcgttgaatgccgagctggagaaaattgagaagccagccgggattagcaacccgaaagacttccgtaacgaaatcgtcaactttgtgctgcgcgccagagccaacaacagcggacgtaatccgaactggaccagctatgagaaactgcgcacggttattgagaagaaaatgttctccaataccgaagagctgttgccggtcatttcgtttaatgccaaaacctcaaccgatgagcagaaaaaacacgacgactttgtcgaccgcatgatggaaaaaggctacacccgcaaacaggttcgcctgctgtgcgagtggtacctgcgggttcgtaaatcgtcctgatgcgtccaacccggcggcacgccgccgggtcaactgcagctgaatgatgataagtaaagttggctaatgcagtacaggagggcatatgacctggttcatagaccgacgcctgaacgggaaaaacaaaagcgccgtcaaccgccagcgctttttgcgccgttataaggcgcagattaaacagtcgatctccgaggccatcaacaagcgctcggtgaccgatattgagagcggagaatccgtctcgatcccgacggacgatatcaacgagccgatgtttcatcagggtcgcggcggcctgcgcaaccgcgtccacccgggcaacgaccattttgtgcaaaacgaccgcattgagcgcccgcagggcggtggcggcggcggcggtagcggtcaggggcaagccagcgccgatggtgaaggaaaggatgagtttgtcttccagatctcgaaagatgaatacctggatctgttatttgaagatctggccctgccgaacctgaagaaaaaccagcaccggcagctgaatgagtttaaaacccatcgcgcgggttttacctccaatggggtgccagccaacatcagcgtggtacgttcactgcagaactcgctggcccgccgtacggcgatgaccgccggcaagcgtcgtgaactgcgcgccctggaggaggatctggaagccatcagccgcagcgaaccggtgcagctgctggaggaggagcgcctgcgcaaagagattgccgaactgcgggctaaaatagagcgggtgccgtttatcgacacctttgatttacgctacaaaaattacgaaaaacggccggagccttccagccaggcggtgatgttctgtctgatggacgtctcaggctcgatggaccaggccaccaaagacatggccaagcgcttttatatcctgctgtatctgttcctcagccggacttataaaaacgtcgacgtggtctatatccgccaccatacccaggcaaaagaggtggatgagcacgaattcttctattctcaggaaaccggcggcaccattgtctccagcgccctgaagctgatggatgaagtagtgcaggcccgctatgatccggcgcagtggaacatctacgccgcccaggcgtcggatggcgacaactgggccgatgactccccgctgtgccacgaactgctggcgaagaaaattctgccggtggtgcgttattacagctatatcgaaattacccgccgggcgcatcagaccctgtggcgcgagtatgaacacctgcaggcgacctttgataatttcgccatgcagcatattcgcgaccaggaggatatctacccggtattccgcgaactgtttcacaagcagtcatctaaaagtgaagcttaattaaatactcagccagtgagtcgagtgacttgctggctgttttcctcagacacaaggcccggtggcacatccatacatcatgtaaaacggaaacaacggggccagggcaacggcgccaagcgagctaatcgttttggtcttatcattgattgataccacaacggggtgcgctaactggtaggcggcggccagatctgacgcgtccgatgcagtccaaaatcctgtcgctttaaacaacaccccgaggcgatcgttatcaatttgcaccgcatgatactgattcaccagctcgctatgctgcccggcatccagtttgcgctgatccatcaccaccagatattccgccgtcacctcatgttgtaccacgacaaagttaacccgcacgccggaagcctgttggtgaaagcgttcataaaaggtcttataacgctgatattcctgaggcacaccgtcacggacaaagcggtaactgtatttcgctgagctggcgacaataccggactctgtgggtttcatcgccacaatggtatcccgaggcggcaagtttggcgtgctggtacatcctgcgagtatcgccaccaccaccagcgataagacatatttcatcattttcagccgttcctgttcgcgattttctctatgacatctggcgtttttttaacactccaggtacaaatccctaaccctgtgtatcataactgcctaatctgcttcaaacattcgcgcgatcgtcagcgttgaactgtttctactctcaggagcctgctatgacccctttttatcaattgacggctacccgcctgcgcggccagcccctctccatggctgactatgctggcaaggtggttctggtggtgaatacggccagccattgtggcttcacaccgcaatacgctggcctggaagcgctctacaaaaagtacgcggctcaggggctggtagtgcttggtttcccgtgcaaccagtttggtaagcaggaacccggcggtgcggatgaaatcgagcagacttgtcacgttaactacggcgtgagcttcccgatgtttgagaaagtggacgtcaacggccccgccgcacacccgctgtttcgttatctgaaacaagcgttgcccggcgtgctcggcggacggatcaagtggaatttcaccaagttcctcatcggtcgcgacggcacacccctcacgcgttttgcgccgttcacgacgccggagaaaatggaagcctccattgtcgcggccctcacgcgctgagtgttcccatcatgccacgttcacccagcggcggctggctgcccatacaaggtagacgtcgctctcgcgcagccagcaaccgcctgctgctggccaatcttccacctgcccggtcatcagcctacagcggcgacacgacctcgacttcatgctgaaacacataggggtcggagaggagttcgaatgcgtcgtcgtccggataggtgaccgcaacgtgatagtcttcgccagcgaaggctttgaccgccgcgagatcctgccagtaggtggcaagaaagaaatgcgcccattcgccctggttttcctggcgcaccagcgccccccggttgccggcgatgctctgagcgtgttccacgccggtcagctcaaggtggcgggcaaacccctcagcatgttgcaatggcacacagccgtgccaggtcctgacaatcatttgcgttctcctgtggtgataaacgtctcaccctaacatcgacaggcatttctgggggagcgcaacaatgccgcgctggccacaacacaaaattattttgccggacggggatatcctctcactctgcagtattttcgactgcggggcagcattgggccgaatattgcgcggcgagtatcactgttagctgggcggaaaaaatcgtggctcgtcagcctctggcagtcttatcgatacacgcccaagccgcgccccttcagggcatcgccagccgatcttgatggtccgcaaagagagcgatgagatggtcggcgagaacccgcacgcgtctggatccggccaggtcagaatgcatcaccagccagagggtctgatccgcgccgatctccggctgcaggcactgcaggccgctggcccgcgccataaagtgcggcaggacgcccaatccgaggcccgcggatactgcggaaacctgggccacgagcgtattggcttcgactttacacggccggccgcgcagggtgcgcgtgatccattgggcggccggcaggtgctggtgagtttccggccaccccacaaagtccgcctcgctcagcgacaggccgtccgcgccgaccagacagtcggcggcgccatagacgccaaaccccaccgtccccagccgctttaacgtcagatgcccggcctcaggcttgaccatgcggatcgccagatcggcatcccgacggtgcaggttcaccggctgcacaccgctcagcacctccacccgcagctcgggataatggtccaggagccctttcagggagggcagaataaaatgcgtggccaggttatccgaggtagccagacggacaaccccggcgacatgcccctgcagttgcgccgcttcgccgaacgccaggccagcgtattccagcgcctccgcccgcgcgagcagggcttcgccatcgtcggtcaggcggtagccgctctgatggcggctgaagagcggaacgttcaacgcctgctccagccgatccagccggcgggacacggtggcaattcccatgttcatcttgtcggcggcgccgctcagcgttcccgcccgggcgatggcgaggaagatgcgcgcatcatcccaatgaaattctgctgtcatctcttttccatttatggaaaacggctctccgttttccgctcttttttatcaattttgcagggatgatactgcacgccattcgcggagacaaccaggccatccggtcgcctgctctctcctcacctgaacgtccgtgcaccgcgcggaacgctcctttcctaaggatacgcctgatatgaaagagattgctttacccctccacccggcgccggcgcgcgtctggattgccgtcgttgcgctcgggatctgcgccttttcgatcgtcaccagcgaactggcgccggtgggcatgctcagcgccctggcggcggattttcaccagacggaatccggcgtgggcctcgccgtcaccgcctatggctgggtaggcgccctggcggctctgctttccggcgcaatgccgacgcgtatttcccgcaaggcgctgctggtcgggctgatgctgatcctcgcgttttcctgcctcgccgcaacccggtcttattcgatgttcgccctgatgagcgcccgcatgattggcgccctggcgcatggcgccttctgggccttaattggcattgtcgccgcgcagctggtgccgccgcaccggctggggctggccacggcgatcatttttggcggcgtgtcagcggcaagcgtagtgggggtgccgctggcgagctttatcgccaccctggcgggctggcgacccgcgtttatgtcgatggccttgctgtcactagccgccgctgcggtgctgtgctcgacgctgcccccgctggccgcccctgcccccgtcaggctgcgtgtttatcgcgatatcttccgcaatccgctgctcggtggcctgtatggcgccacggcctgcatcattaccgctcactttgccgccttcacctacattgaaccgctgctgataaatctgcagggagtcccggcgaccgccctctccggcctgctgctgctgtcaggggtttccgggctgctgggtaacgttatcgcgggtaagcttatcgatcgtcatctgaaggggctgattttcgctgcgctgctgctgagcgggggcgcgctggcgctccttggcgccgcccgtcttgcgccactgccgttctgttttagcgggctactgttagccctgtggggcaccggcatcgcgattgtgttcgtcggcttacagacctggctgctgcgcagcgcgggcgcggtcgcccagccggcgtcagccatttacgtggccatttttaatgccgccatcggcaccggggcgtttgtcggcggccagctgatcgcctcagctggcctgtcggaaatggtgtggctggcggcggggatcatggtgggcagtacgctactgatcgccctgctgaaagcgcctctgcccggtcagatcagtgcggcgacggcaggcgcttagatttgcgccagcccgccgtcgacatagatctccgcggcgttaataaagctcgactcatccgacgctaaaaataccaccgtccggccaatctcctccggctcgcccagccgcccgagcggtacgccggccgccagagcatcgaacaagccctggcggtccgcctccgccaccagccctcccagacctggggtacgtaccggccccgggctgaccacattgatgcggatcccacggtcgctaacctccagcgcccaggagcgcgccaggctgcgtaccgcggccttactggcgctatagatgctgaagttagccgtcccttttaccgccgccgtagagccggtcaaaatcaccgaggcgccatcggcgagcagcggcagcgctttttgcacggtgaacaccaccccgcgcacgttggtggcgaaaatccggtcgacgtgtgcttcggtgatggcgctcagcggcagcatgtctccgccgccggcattggcgaacagcacatccagccggccggactcttcggcaatggtcgcaaataccgcgtcaaggtcgcttaacacggcggcgtcggcgcggatcccgcgggcggcgggcccgatgaatcttaccgccgcatccagctcctcctgacggcggccggtgatgtacaccttcgcgccctgctccgccagtgctttcgccgacgccaggccaatcccggcgctgccgccggtgactaacgccactttatccgcaagttttttgctcatggtgcatttccttggttagagtataaacaggccaggctcgcgaacgcgccccgccgggtatggaaagcactgtaatcgtcccggcgaggcggaaaaatggcctaatctgaaaaacactcttcccctcggtggataatgacctccagtaaccaggataaagcgaataatggaccggttttcagctctcaaagccttcactcgcgttgtcgaagccggcagctttacccgcgccgcggactcgctgaatatgcccaacgccaccctcagcaaaaccattcagcaactggaggcgcatcttggggtttccctcctgcagcgcaccacgcggcgtattaccgtgacgccggaaggacgggagtactatgaaaaagcccgctgtctgctggaagacctggaagagatcgacgcgtctttcaataccgcccgcaataagccgaagggccatctacggatcgccatcggcgggtcgaccgcgtgcgatgtgctgatcccgctgctggcggactttatgacctcctggccggatatccgtatcgatttgcaggtggccgataagcccgcggacctcatcagcggcaatattgactgcgccatccgcggcggtccgatggaagactcgacgctgatcgcccgtaaaatcggcgaggcgacgctggtcacctgcgccacccctggctatcttcagcgctacggcacccccgcctcgccggatgaactacatcttggccaccggctcatcagctatctgtcgccggccagcggcagagcgtttccgtttcgctttacgcgtcacggcgtcagcaccgagctgaagacagagccccatctcggcatcaatgagagcaacgcgcatattgccgccggcgaggcgggcttaggcattgtgcagacctttacctattcgctgaaaccggcgctggcgagcggcgaactggtggagatcctcagcgcctggcgcccggccccctatccttttcacgttgtctatgcccggcaccggcacgtcccgccccggctccgcgtctttattgactggctggcggcggtttttccggccgcggtgcagggatagcgcgcgttatctgacgcggagcaggtcgccgtatcgcgtggtgtagcgcggcgagagcatctctcgcttcatctgccactgctgctggatcccctggccggcaaaatagagcgcccccctgccgtttttcgcattcagctgatcgagaacctgcatcagtctggcgctgttgtgccgcggagcaagctcgtcgaacagattcagctgggcgacgccctggctgtagaaatcgccgagcatcacgccggccttctgatagcgatgccccgctttccagatggcatccagacagctcgtcgccgcggcgataatatcccgggagtcctgggtcggcgtcagcagctttagcgaggcgctgttgccgtaatagggttcattcagcgcgaaggggctggttttgacaaaggcggagacgaaccggcagtactgatgctcaccgcgcagcttttctgctgcccgcgcggcatagctgcagatcgcctggcgcatatcctcataggccgtaatccgatccccgaacgagcggctgcagataatttcctgcttagcgggggcaaactcctccagcgccaggcaaggctcgccgcgcagctcccgtaccgttcgttcgagcaccaccgtgaagtgcttgcggataaagcggatatcgctctccgccagctggagtaccgtgccgatccccatcgcttcaagctttttgccgatccgccgcccgatgccccagacctcgctcaccggcagcagcgccatcagctttcgctgccgctgcgggcaggacaagtccactaccccgcccgtctgccgcggccactgcttcgccgcgtggttggccagcttcgccagggttttggtctgggcgatgccaacgcccagcgtcagatgggtacgctgcagcaccgtggcgcggatttcgcggccaaaatcggtcagatctctgcaatgacgcacaccgctgacatcgcaaaaggcctcatcgatactgtaaatttcgcagcgcggggtgagctcttccagggtggccatcacccggctggacatgtcggcatacagctcataattactgctaaacgccacgacgccgtggcgaagaaacgcagccttctgcttaaagtagggttcacccattttcacaaacggcttcgcctccgccgagcgggcgatcacgcagccgtcgttgttcgacagcaccaccaccggccgccccttcaggtctggccggaaggcggtctgacagctggcatagaaggcgttcacatcacaatgcgcgaacatgatcagcccgccgccttgatgatgtaggttacgacgccgaaaatatcgagcgtctcctcgcggccgaccacgatgggcgaataggccgggttcatcgggttaagctgcacccgcggcagaagctgcagcttctttaccgtaaactcgccgccgacggcggcaatcacgatatcgccatgctccgctttacgcgcgctgtccaccaccagcaaatcgccttcgtcaatgccggcatcgatcatgctgtcgccagcggctttgacaaaataggtcgcgctgggatgctgcaccagcagctcgttgaggtcgattcgcttctcaacatagtcctgagccgggctgggaaagccgcactgcaccaggtcggcaaaaaagggaaaggagacaatctgacgtagctcaaccggcgtgtaaacgttcatttttcaacccaccacacaatactgaatatatatacagtagttttgccagttttaccggtcaatatcggctccagctatcaatcgccagcactgaaataactccttgatgtcaataggggtcttcttcagcgccggcgaaccgtttgctgcttttgcgcgcagcccgcccgccgcgcgaggtggtagatacgcagcgccgcggcattcgcttgacactgtacattaatacagtaaaactatcgcccgcgatcagcatacagaggacagaagatgtttgtggaactgatttatgacaagcgcaattttgccgggctgccgggcgccagagaggccattcttaacgagctgaccaaacgcatgcagcgcattttcccggaggcggaagtgcgggtgaagccgatgatgacgctgccggcgatcaacaccgacgccagcaagcatgaaaaagagctgatcagccgcacggtgcaggagatgtttgaagaggcggatatgtggctcactgaagagtgatcccgcccgtcagtcgcggcgaccacctctttaagagctttcccggatgtggcagagccgcgggcaacagtacaatagcggcggttgcagactggcaatgcaaccttcgctcacctgctggctcttgcatacggccagcaggtgagccctacctgtctcccctcatcgcctcaccgcgtctccggtagcgctgctataattctatccactagcccgcgatgctgatggaccttcccgcatttaacaatgatctgcctggcgttgtcatagcccggggcccacagccggttattaagcagaacgtccttatagaccgcgatcagcggtttgttccacgccgccgccatgtgcaccaccgaggtgtccggggagataatcagctccgcctgggcgatcagcgccatcgcatggtgtaacgtgttaaatgggttaatcaccacctccggcggcagcgggatgcggatctcgcgccggtgatcgagcagaataaccgcgttccccggatggcgggccagcagtttgtcgagcagttccgccagctgcgtctgcgagagactgcggtcggcatggccggcaaaaatattaatcaccaccgcttttccgcttagcgacgccagatactgcgccacctcctgcataatcggcccgggcaccgccaggtcgtaagcgtccagcccgcgggtgtccagttggagataatcggcgatcagctcgaacgttttcgtcacgtgccagcgctggcagtcaaaatcaaaagagtgggagtagtgcttaatcgatggccatttattaaacccgagcactgatttggcttttatttgtcggaaaagccgcaggcgatgcacgggaatatcgaacagcgaaggatcaataataatatcgtacttattattagccagttcattaataacgtcgcgaggaacgttatgattaaatttacgcaaaaaatcggcggacgtgaccgggtcagcttcataaatatggcggatccgcgggttataacgcatcacctggctgttagaggtcgtcagcaaaaaatcaacgatatagcctgactgatgcaggcatttcaccagcgcggaatccaccactacatcgccgaccgccccctcattgcgcatcaacaggacggttttcgcagacgacaaatctaccggctgacggcgtcggcgatcccagagtgctttcgccacccccacccgcagggcattacgtactttcttagtaaagtaattccgccgtctgttgagctcccttattttattaaatttcttgcgtggggaaccctgcatggttgcatcgtgcatcatcctaacctcattacggcaattattaatattctgtgtcgtccgatagagactgagcgaaataaaaaaagttcgattgaaaatgaaaatcattcttttttttatttacaaaactcatctgcgcctgcgggattgcaccacagcactgtgaagtaataatgagcgaatagtgaatttcccggcccaccgttggcaggccggcgcaacagcgctaagctggctgctttatgatgtcaggaggacgctatgcttgaagcagtagaaggtaatatccaccagcggctgtgcgcgctgctcgacgagcaccgggcccgctaccgggtgatggcgcacgaggcggtcggtcagtgcgaagccgtctcggcaatccgcggcaccgcgcttggccagggcgcgaaagcgttagtctgtaaagtgaaaggaaacggcgtcaaccagcatgtgctggcgatcctcgccgccgatcggcaggccgacctcgccagcctggcccggcatatcggcggcagcaaagcctcgctggccagcccggcggaggtggaggccctcaccgcctgcgtgttcggcgccattccccccttcagtttccatccggcgctgcggctggtggcggacccgctgctgtttgaacgctttccacaaatcgcctttaacgccgggcgcctggaccggtcgatcattctcgacaccgaagactatttacatatcgcccgaccagagatcgcgacctttcgccgtcttagctaaccgggcatccgcccagatttccgccgcatggcgtaaaaatcctgtttattcacgccacgatgcgtagagtaagcgggatatttttggcattcttattttggcaaggacctctgtacatgtttgataccaccctgttgatcctgctgggtctggcggcgctcggctttatcagtcataacaccaccgtggcgatctccatcctcgtgctgattatcgtgcgcgtcacgccgctgaacgccttctttccctgggttgagaaacagggactgaccgtcgggatcattattctgaccatcggcgtgatggcgcctatcgccagcggcacgctgccgccctcgacgctgatccactcctttatgaactggaaatcgctgctggcgattgcggtcggggtgtttgtttcgtggctcggcgggcgcggcgtctccctgatgggctcccagccgcatctggtggccgggctgctggtcggtacagtactcggcgtcgccctgtttcgcggcgtcccggtcgggccgctgattgccgccgggatcatctcattgtttattgggaagtcgtagccaggctaccgtgatagcggcccggtgtctgcccgagcccttttttaaacatggtgatgaaggcggtggtggaatcgtagcccagcgcctgagccgtctgctgcaccgtctgcccgcggatcagcagctgcagcgcgaggatcagctgcagctgatggcgccagcggcgaaagctcagccccgtttcgcgcactaccaggcgggccagattccgctcgctcatcgcaaacaccgccgcccactggctcagggtctgccagcgcgccggatcctcggccatcatcgtcaccatttgacgaattttcgggtggtttgataccggcagctgcaggtgctcctgcggctggcggggcagctcatcaaacagaacctgcaccagccgggccgtggcgggggcggccagggactctccgccgcgctccgccagagtaaggatcagctctcgcaccagcggggaaatctttaacgtacagcagcgatccggcatcggcgcggcgcccggctcgatgaacaggaagcatacctgggcgccgggggtagcgcggttactgtgggacagctgccccggaacccacaccgcatactgcggcggcaccatccacattgcgttctccacctcgcaggtcaaggcgccgtgcagggcaaggatcagctgccccttacggtgggaatgcgccggaatatactgctccgcctccaccacccggatacgaaaggcaatggccgattcgtggccactgtccggttcatagccatccagccccagtccaatcatcatattgtccgatattagcgataatctgtcattttagcttgatttaaacgagggacaaagccgctatcgtaacccccctcgttagttaccttgagaatgatatgtcttctgtgatctcctctaccggccgccgccccgcgctgctgattgccggtatcctgctcatcgccaccaccctgcgcgtggtctttaccggcgcggcgccgctgctggacgcgattcgtagcgactatggcctgactaccgcgcagaccgggctgctcactaccctgccgctgctggcctttggccttgtctcgccgctggcggcaggggttgcccgccggttcggcatggaacgcagcctgctgctggcgatgctgctgatctgcgccggcattgccctgcgctccctgccctccgctgcgctgctgtttatcggcacggcggtgatcggctgcggcattgcgctgggtaacgtgctgctgcccgggctgattaaacgggatttctcgcagcatgtcgcgcggatgaccggcgcctattccctgacgatgggcggcgcggcggcgcttggttcggcgctggtggtccccgtggcgatggccggattcggctggcgcggggcgctgctgctgctgatggtcttcccgctactggcgctcctcagctggctgccgcagtcccggcgccgggcggagacgccattgaccggctcaggcgctatgcataaccgggggatctggcggtcggcgctggcctggcaggtgacgctgttcctcggcatcaactcgctggtctattacgtgattatcggctggctgccgtcgattctgcagagtatgggctatagcgaagcgcaggccggctcgctgcatggcctgctgcagctggcgaccgccgcgcccggcctggcgataccgctgatcctgcatcggctgcgcgaccagcgcgggatcgcggtgctggtcgccctgatgtgcgccatcagcgccgccgggctgtggctgttgcctgagctggcgatcggctggacgctgctgttcggctttggctccggagccactatgatcctcggcctgacgtttatcggcctgcgcgccagctcggcgcatcaggccgcggcgctgtcagggatggcgcagagcgtcggctatctgctggccgcctgcgggccgccgctgatgggcaggatccatgatgccaatggcgactggcatattccgctgctggcggtggcgctgatttcgctggtgatggcgatctgcggcgcgctcgccggacgtgaccgggaaattcacccctgaagatgaccggcagcacccgctgccggtggaattattgtgccgcggcgcggagaaacgcctgcaccagcggcgcgggacgcccgtccagcgcgtgacgctcatgctggaacaaggtggcgacaaaaaacgggtgcgtcaccagctcgacggcgcggatctcaccctcttcatcccagccggtgacgcgcagatcgccctgctccagctccgccgcaaacgcgctgctcacgccgtaccggcagtggtagccctcttcaatgctctcccggccataggcgcgggcaatcagcgtattcgcccgcagctcgacgacggcagaggtctccaccagcgagcagctgaggggagcgatcaccatccgcccttcgctgtcggtttccgcatgtccggcgtcctgccagccgagcacgttgcgggcgtattcaatcaccgcgtgctgaaagccgccgcaggtgccgaggaaaggaatgctgttttcccgggcatagcggatcgcggtaaacgcgccttccgggtgacgatacgggctgccgggaacgacccagatggcatcgtactccgccagcgcctcgccggaggcgatcgacggggtggcgagccagtcatatttcaccggctgctccagcacggcggcggcatcgtctatcgccaggggaatggcctgatgggcaacaatatcggggtgataatcgccgacaagggcgaggcgtaaaggagttttcatagcaggttccttatgtctggacgagacggacagcacaaggcacgtcagaatagcgatcccgcctgtggaacacaatccttattttcaccccaccgccgtggccgacgggtgaggtatactggaaaaagcgcgtaagggagagagaatgaaaaataagcttttggtcagcgcctgcctgatgggattccaggtgcggtataacggtagcgagaaggcacaactggcggcgacgctgtcccgctggcagcaggcggggcggctggtgatccactgcccggagctggcggccggtctgcctacgccccgactgccggcggagatcctcggcggcaccggcggcgatgtgcttgccggacgggcgcggatcgtggaaagcgacggccgcgacgtcaccggacattatcagctggccgcctggctggcgctcagcgccgcccgggaagcgggctgtcaggcagcgttactcaccgacggcagccctacctgcggcagccagtatgtctatgacggttcctttcgcggacggcgcaaagcgggcgccggcgtggccgccgacctactccgcgcccacggcatcacggtattttccgacgggcaaatcccgcagttgctcgcctggatggcacagaaggagcaggatgatgattcagtgtaaacgggtgtatgacccgcaggaaagcagcgacggctatcgggtgctggtcgaccgtctctggccgcgggggattaaaaaagaggcgctggcctgtgatgagtggtgtaaggagttaacgccttccgctgagctgcgcaaagcctttcacggcgaggcgatcgatttcgcccacttcagccagcgctatcgtcaggagctcgacgcccatcgcgaaacgggcctgcggctggcggcgctggcgcaacgccagccgctgacgctgctgtacgctgcgaagaacaccgagcagaatcatgcccgggtgttggccgcctggctgacggccctgccggttacgatttagccggatgatcccggcgccacagcgcccactcgtcgagggtttcgccgctgggtagtttgcactgggtgctgacgccctgcggcgtttgcaccggcaccctggtgccgcctgattgctgacagtataccgccgcggggttgggcatgccgatggttttcgtcggcgcagtgggctgcggctgggtacagccggctaataacagtggcagaatagccagtagctttttcattgttcctccctttcctgaatgcccggggattttagcctgaatctccacgttttctccatcttgcctgcacttttcccccgtagagtagccctgttctcgaactgaccagagaacagatcattccataatcaatgagtttttccccgtcgcccccgacggggcttttttttgggatttaataaattgaaat

SEQ ID NO: 5322 - DNA, 117102 bp, Unknown
  gut microbiota DNA sequence
cgcagacatccccggggtcggcagcaatgcctctcccgggctaccagaccgtacccgccaggtagcccggctaagcgcagcgccgccgggaggatgcccaaaaacaacaaagcccgggctagcccgggccttgctcacagtatgacgattaataataggctttcagcgtccgctggcagagggccgagcgcacgcagtcatcggtggtgaaacgcacgatgccgatcatctcgtcttcctcaaaacgcgccagcgcatcgctcaggccagatctcacgccagagggcaagtcgcactgggtgatatcgccattgacgatgaccgtcacgttctccccgaggcgggttaaaaacatcttcatctgcgctgcggtcacgttctgggcctcgtccagaatcaccaccgcattttcaaaggtacgtccgcgcatataggcgaacggcgcgatttccaccttgccgatttccggacgcaggcagtactgcataaaggaagcccccagccttttcaccagcacatcgtaaaccggtcggaaatagggagcgaacttttcggcgatatctcccggtaagaagccgagatcttcgtcggcctgcagaacgggacgggtaacaataattctgtccacatccttatggatcagggcttcagctgccttcgccgcactgatccaggtcttgccgcatccagcttcgccggtagcgaaaatcagctgcttattgtcgatggcattcaaataatgcgcctgagcctcattgcgcgcctcaattggggaagtatcacggctgtcccgcgccatgccaattgcttctacgccactcatttgcacaagcgatgtgaccgattcttcttcacgctgcttatggctgcgtgaatcccgtctcagcacacgttttgcttcacgacgagctttgatcactgctttttgtcttcccatggatagcaccttgcgttgttggtttacatcacacgcgtcaacatcgacacgactatgcgcacgaacgattgaggtttggcttccttgtaagccattgcttgccggtagaactgacaacgagtcgcggctacgcgcaccgcgtaccctgccaaggttgtaataatgcgaagcggagagagaaagagtaagaaaatcgctgccggaagcggggcttccgtgctgaagagtacggtctgaggttttacgttgtccggtacgggaccttaccattcgcgatctccatagtgaaacgtcacactgccgggaactaccgcgtatgtaataagtacatcaaaaaagattcttaatgcaacttatttttcacaatgacgcaacaaatagttcttaagcaagtgtaggagactatcggtcatttgtattacagaaatataacacatggcaggaaatataagaaaaatgagaaaaacagcagaaaacgccctgcccttacgggcagggttggtatcaggcctgcagcagcgactctcccagatagtgtttttcatccactacgccgggtaaaacaaagaagtagcccccgccgatcggtttgacatactcctccagcgcctcgccgttaagccgtttctgcaccgtcagaaaacccttttccagatcgtgctgatagcaaacgaataacagccccatatccagttgtccggcgttagtaacccccagcgaatagctgtagccgcggcgcatcatcaggctggactgggtttccggcgtgcggggattggccaaacgaatatggctatccagcgcaatgacttcgccgttaggatctttactgtaatccggggtatcgtgttcgtttttcatccccagcggcgcaccggtgtgcttgtcgcgaccaaagatcgtctgctgctccttgagcggcgtccgatcccagaactccacgtgaaactggataattcgcgccgcctgatagctgccgcccacggtccaggccggctcgtcctgatcgactgtcacccacactaccttatccatcaacgctctgtcgtggctcgccgggttagcggtgccgtccttaaaccccaacaggttgatgggggtctctttgcctttgctgcgcgccgcgctgtcggagataaacccttcccgcttccagcgcacgctcagcagatccggcgtatgtttgatgacatcacgcagggcgtggatcaccgtatcctgagtattggcgcagatctgcagcagcaggtcgccatggcacagcgcggcatccagcgaatcgttggggaagcgggtcatcggctgcagctttttcggtgctttatccgccaggccaaagcgctcatcaaatagcgaatggccgaccgagacggtgatggtcaggttatctggcgcaatccacggccccaggatgccggaatccatcggcggcagccgcggattcggcgtgtccggcgccgggccgccctgggttaaaaaggcgatacgctgggtcagcagtcgaaacagccgctcgaggtcggctttatcagccgccagcacatcgaaggccaccagcatcatcgaagcctgctgcggcgtcagaatgcccgcctgatgccggccatagaatggctgcttttcctggcgcgcgtcgggtgtgagcgtccccggggaactttccgcttttgccgcatgcgctaccgggcagccgccggtgatggccagcgcgccgccaagcgcgccgatccctttcagtaagcgacgacgtgacggctcgttcacgtcgtggggtttctgctgtgccatcgacttagtccagccccaggatcccgcgcagctgagccagatcttccgccagggtggtgatcggccctttcagcgcattacggtcggcggtggtcagcttatcgtaggtctcgaaaccgtctttggtgcgatatttgctgaggatgctgtccactttcttaaagttggcgtccactttcgccagaagcgcgctgttctctttttgcagctgcgggcgcagcaggtcgacaattttctgcgcgccgtcaatgttggcctggaagtcccacagatcggtatggctgtagcgatcttcttcaccgctgatcttgctggccgcgacttcctcaattaatcctgccgcgccgcccacgacttttgacggcgggaacgccagctcgctgatacgcttttgcagctccagcacatcgctgttcagctgatcggcatatttttccatccccttgacgctgttatcgccaaacagcgctttttccagacggtggaaaccggtaaatttcggatcttccgcttttttctcgaagtcgtcttcgcgggcgtcgatgctgccgtcaaggtcagagaacagctcggcaatgggctcgatgcgctcgtaatgctgacgcgtcggggcgtacagcgctttcgctttttcgatatcgccggctttcaccgcgtcggtaaaggctttggtgccgctaaccagctgcgcggtttccgccgtcacataggctttataggcggtgatcgcgtcgccgaggctcagcaccgcatccgctttcgccgcgtctttggtggcggcgccggtgacgatcagtttgcctttcgggttggtgagcaggccacaggtcatgtcatattcgcccggctgcaggttcgcggtgagcttctgagtaaagcccggcgcgatgttttcgcgctcttccaccaccatcacccctttcagaatctcccactccagcgctttctggctgtggttctgaataataaactgggttttacccgcgttaacggtcacctgcatcggctcgcactgcttgtcgttgacggtgactttgacctgcgggatatccgcagcctgagcaccgaatgcagagctgagcagcgcggccacggtcacccgcagcgcattacggcgaaaatgaatcatcatgatcatccctttcggtaagtagagtgtcgcttataagctcgcagcgcccggtcaggcagcccgcgaggcagtggtattattccgcggcggcagggcaaacagcaccagcgccgggatcagataaagcagatagacagccacttcgctgacgctcggcgtctcctgataaccgaagatcccttccagcagcgtgccgaacagcgtatgcgtcgacagcacgttgctcagatcgaaggcggtatcctggaacaggttccacaggcccgcctcgtggaaggcgcggatcgcccccgcggccaggccagcggccaccagcagaataaacaggctggtccatttgaagaacacgccaaggttaaggcggataccgccccagtagatcaggaagcccagcacgatagcggtggccagacccagcagcgcccccagcggcggccagataccgacatcctgctggaatgccgccagcagaaagaagaccgactccagcccctcacgggcgaccgcgaaaaagaccatcatcaccagtgcccagccgtggtgattaccgcgctgcagcgccttgtccacggcctgctccagctgctgcttgacgttgcgtgagacattgcgcatccagaagaccatccacgtcaggatcaccaccgcaatgaccgcgacgatcccttcgaacagctcctgttcacgctgaggaaattcaccggtggtttcgttgataaagatgcctaagccaagacacagcgccgccgcgaggatcacgccaatccacatcacgccaatccagttgccgcgctgggtgcgtttcagatagctggcgatcaggctgacaatcagcgccgcctccaggccttcgcgtaacataatgagaaatgggacaaacatgccaatacccttaaatgtaaagcaccgtcaacgaatgcaaaaacaggtaatatttatgatagtgattatcattacaatgctcagaaacacaagcgaaatgtgcagagaatgatgatcagttgtaaataaatcgctgacaaataatgacttatgaaaatattcgcctgttatgaagagaaagaataagcaaaggattttttacgccagatatttacccgccgtagcggctatggctaaatggcggccttattgacttgcgaaaagaacaacatgactgcattttttcatttcctgctggcgctggcggtgatcctcgccctggcctggcttgtcagctacgacagacaaaaaattcgtattcgttatattctccagttgattattatcgaaatagcgctcgctttctttttcctgcacgccgaaagcggcctgtggctggtaaaaaatatttccggcttttttgcttcgctgttaggctttgccgccgaagggaccaatttcgtctttggcggcatgagcgaaaaaggcttagcctttattttcctgggcgtcctgtgtccgattgtgtttatttccgcgctgattggtattctccagcactggcggatcctgccgatttttattcgcgtgattggcaccctgctgtcgaaagtaaacggcatgggtaagctggaatctttcaacgccgtcagctcgctgatcctcggtcaatcagagaacttcattgcctacaagggcgtactgggcgacctctcctcacggcgactgttcactatggcggcgacggccatgtcgaccgtatcgctgtcgattgtcggcgcctatatgaccatgctggacgccaaatatgtcgtcgcagcgctgatcctcaatatgttcagcacctttatcgtgctgtcggtaattaacccgacgcggccaggcagcgagcaggaaataaaactcgagaagctgcatgaatcgcagagtttctttgaaatgctcggggagtatattctggccggctttaaagtggcgatgattattctggcgatgctgatcggttttatcgccctgatcagcgccattaacgcgctattcgccaccctgtttggtctcagcttccagcagatcctcggctacgtcttttatccgctggcgtggcttatcggcatcccgctgagcgatgcgctaaacgccggcagcatcatggccaccaaactggtcgctaacgaatttgtggcgatgattgagctgcaaaagattgccgccagcatgacccctcgcgggctcggcattctctcggtattcctggtgtcgtttgccaactttgcctcgatcggcattatcgccggggcgatcaaaggcctgaatgaaccgcagggcaatatcgtctcccgcttcggcctgcggctggtgtatagcgccacgctggtaagcctgctttccgccagcttcgccgggctggtgctgtaaaacaaacggcggggctgcccccgccgtttactcagaactgcacgcagaccggctggtcgacacgcatcaccgactcctgcgcgaagcgtgatttatagccctggcgcagagcctcaataccggcctcgctctgcgcgtcatgcccatggatcaccattagcgccttgctctgctcccgcaccacctgaccattctggccaagccactggccgtgggcatcaaacaccgtcagcccgtcgcgaaagcgcggcgtgacgtcacggtcgacaaacttttgccactcttcagcggtgatgtctttccccgccgggcggctcagaccgaagtaaagcgtggtttgcaccatggacttatccgccgggcagacgccgggcttcggcgcgctggtcgatgaacttccacccgccacgcagccgctgagtaaccctgccagcaccagcgccattgcaccctgtctgaacgtcatctttgctatcctcattgttattagtcaggaaatatcagcggattttcagataattagcaagggttataatattccggcacggcaccaggcaataaaaagcccgccagcggcgggctcgtgagcatcagatgatcttactcagccgtggcgcgtaccggcggcggcgtatggtagtgggcatccgcttcggcaaagcgctgctgcatgctggccgacggcgctttatccagcaggctaaagaccacaatcccgatgctgccgaagacaaagcccggaatgatttcatacaggcccagccagccaaactgcttccagacgatcacggtcagggcgccaatcaccatcccggccagcgcgccgttacgggtcatgcgcgaccacattaccgagaacaggaccaccgggccaaaggcggcgccgaagccagcccaggcgtagctcaccagacccagcacgcggttttccggattggccgccagggcaatggccaccagagcaaccaccagcaccatcatacggcccacccacaccagctctttctgaccggcgtttttccgcaggaaggctttatacaggtcttcggtaattgcgctcgagcagaccagcagctgacagctcagggtggacatcaccgccgccagaatcgccgacagcaggatcccggcaatccacgggttaaacaggatttgcgccagttcgataaacacgcgctcggcgttctggttaaccgcgcccgccaggctcgggttgttattgaagtaggcgatgccaaagaagccgacggccaccgccccgccgaggcagaggatcatccaggtcatactaatgcgacgtgcgtgaacgatgctgtggtgcgaatccgccgccataaagcgcgccagaatatgcggctgaccgaaataacccagcccccagcccatcagcgagataatcgccacgaagttcagccctttcagcatgtcgatattttcgatgctcttctgcttaatcacttccagcgaatcgccaaagccgccgacggaaataatcacgatcaccggggtgaggatcagcgcaaaaatcatcaggctggcctgcacggtatcggtccagctaaccgcgaggaagccgccgacgaaggtatagataatcgtcgccgccgccccggcccacagtgcggtttcataactcatgccgaaggtgctttcaaacagacgcgcccccgcgacaattcctgaagcgcaatagatggtaaagaacagcagaataaccagcgccgaaataattctcagcacccggcttttatcttcaaaacggccggtaaaataatcgggcagcgtcagggcgttattattcacctcggtatgcacgcgcaggcgaccggccaccagcttccagttaatccacgcccccagcgttaagccaatggcgatccagctttcggaaatcccggagagaaaaatcgcccctggcaggcccatcagcagccagccgctcatatccgacgcccctgcggaaagcgcggtcacaaatggccccagactccttcccccgagaatataatcatcgaagtttttggtcgaacgccaggcaataaaccctatcaataccataccaaaaatataaacaataaatgtcaccagcatcggtgtgctaatagccatgcaaagtctccagaatttttatcgacagcgtccaacttcgtcgtttttttccactaccggaacggggtaatggcgcattgtttaattgggcgaccgtatcctgacggaagcttcggtttttcacaaacgatttaacacagcatttacacgaaaaaccgacggcgcaaaacgtcaatttgttagaggttgcactctctcacgtttttaaaggttgcaccaaacaaaagtgttaactcacgcatacaaataccctatgagcccggggttaaatttctgctattttaggggttatttttaacaaattagccatttcacggcttccgtcacaagccacaattaacaaggttgcacaaagttgcaacatagtggatatttccatgcaaccgcataagcctaacgataaatgacaggagttttgagcatgggcaccaccaccatgggtgttaagcttgacgacgcaacccgcgagcgcattaaatccgccgcgagccgtattgaccgcacgccgcactggctgattaagcaggccatctttaattatctggaaaaactggagaacgacgagacgctgcctgagctgccggccctgctctccggggccgccaacgaaagcgatgacgccagcgaaccaacggaagagccctatcagccgttcctcgaattcgccgagcagatcctgccgcagtcggtgagccgcgcggcgatcaccgccgcctggcgacgtccggaaaccgacgcggtaccgatgctgctggagcaggcccgtctgccgcagccgctgggcgaacaggcgcacaagctggcgtatcagctggcggaaaaactgcgcaaccagaaaaccgccagcggccgcgccggcatggtgcagagcctgctgcaggagttctccctctcttcacaggaaggggtggcgctgatgtgcctggcggaagccctgctgcgtattccggataaagccacccgcgatgcgctgatccgcgacaaaatcagcaacggcaactggcagtcgcacatcggccgcagcccgtcgctgttcgtcaacgccgccacctgggggctgctgttcaccggaaaactggtgtcgacccataacgagaccagcctctcccgctccctgaaccgcatcatcggcaagagcggcgaaccgctgatccgcaaaggcgtggatatggcgatgcgcctgatgggcgagcagttcgtcaccggggaaaccatcgccgaagcgctggccaacgcccgcaagctggaagaaaaagggttccgctactcctacgatatgctcggcgaagccgccctgaccgccgctgacgcccaggcctatatggtttcttatcagcaggcgatccatgccatcggcaaagcctccaacggccgcggcatttatgaaggtccgggtatctccattaagctctccgcgctgcacccgcgctacagccgcgcgcagtatgaccgggtgatggaagagctttacccgcggctgaaatcgctgaccctgctggcgcgccagtatgacatcggcatcaatattgacgccgaagaggccgaccgtctggagatctccctcgacctgctggaaaaactgtgcttcgagccggaactggccggctggaacgggattggcttcgtgattcaggcctaccagaagcgctgtccgtttgtcattgattacctgattgacctcgccacccgcagccgccgtcgcctgatgatccgtctggtgaaaggcgcctactgggatagcgaaattaaacgcgcgcagatggaaggtctcgaaggctatccggtatacacccgcaaggtttacaccgacgtctcctacctcgcctgcgcgaagaagctgctggcggtgccgaacctgatttacccgcagtttgccacccataacgcccatactctggcggctatctaccagctggcaggccagaactactacccgggccagtatgagttccagtgcctgcacggcatgggcgaaccgctgtacgagcaggtagtgggcaaggtcgctgacggcaagctgaaccgtccgtgccggatctacgccccggtgggcacccacgagacgctgctggcgtatctggtgcgccgtctgctggaaaacggcgccaatacctctttcgtcaaccgtatcgcggacaataccctgccgctggacgagctggtggccgacccggtcagcgcggtagaaaaactggcgcagcaggaaggccaggccggcctgccgcatccgaaaatcccgctgccgcgcgatctctacggcagcggccggagcaactccgccggtctcgatctggcgaacgagcaccgtctggcctccctctcctcttccctgctcaacagcgcgctgcataaatggcaggcattgccgatgctggagcagccggtggccgaaggcgaaatgcagccggtggttaacccggcagagccgaaagatatcgtcggctacgtccgcgaagccagcgacgctgaagtgcagcaggcgctgaccagcgctatcaacaatgcgccgatctggttcgccactccgccgcaggagcgcgccgccattcttgagcgcgccgcggtgctgatggaaagccagatgccgaccctgatggggatcctggtgcgcgaggcgggtaaaaccttcagcaacgccatcgctgaagtgcgcgaagccgttgacttcctgcactattacgcaggccaggtgcgcgacgatttcgataatgaaactcaccgcccgctgggtccggtggtctgtatcagcccgtggaacttcccgctggcgatcttcaccggccagattgccgccgcgctggcggccggcaacagcgtgctggcgaaacctgccgagcagacgccgcttatcgccgcccagggcgtggcgattctgctggaagccggcgtgccgccgggcgttattcaactgctgccgggccgcggggagaccgtgggcgccgcgctaacctccgatgagcgcgtacgcggcgtgatgttcaccggctccaccgaagtggccaccctgctgcagcgcaatatcgccagccgcctcgatccccagggccgcccgacgccgctgatcgccgaaaccggcgggatgaacgcgatgatcgtcgattcgtcggcgctcaccgagcaggtagtgatcgacgtgctggcttccgcgttcgacagcgccggccagcgctgctccgccctgcgcgtgctttgcctgcaggaagaggtcgccgatcacaccttaaccatgctgcgcggcgccatgagcgagtgccggatgggcaatccggggcgcctgaccaccgatatcggtccggttatcgatgcggaagcgaaagagaatatcgaacgccatattcaggcgatgcgcgccaaaggccgcaccgtctaccaggcggtgcgtgagaatagcgaagacgcccgcgaatggcgtcacgggaccttcgtgccaccgacgcttatcgagctcgacagcttcgacgaactgaaaaaagaggtcttcggcccggtactgcacgtggtgcgctataaccgtaacgagctggacaaactggtcgagcagattaacgcctctggctacggcctgaccctcggcgtgcatacccgtatcgacgaaaccatcgcccaggtcaccggcagcgccaaggtgggcaacctgtacgtcaaccgcaatatggttggcgcggtggtcggcgttcagccgttcggcggcgaagggctgtccggtaccggtccgaaagccggcggtccgctgtatctgtaccgtctgctctccagccgtccacaggacgcggttggcgtaaccttcgcccgccaggatgcggagcgtccgctggacgcccagctgaaaacgctgctggaaaaaccgctgcaggcgctgcagcagtgggccgcgggccgtcctgagctgcaggcgctgtgccagcagtacagcgagcaggcgcaaagcggcactcaacgcctgctgccggggccaactggcgagcgcaacaccctgacgctgatgccgcgcgagcgcgtgctgtgcgtagcggataacgaacaggatgcgctgatccagctggcggctgtgctggcggtgggttgtgaagtactgtggccggacagcgccctgcagcgcgatctggcgaagaaactgccgcgggaggtcagcgagcgcattcgctttgccaaagcggagcagttgcctggccaggccttcgacgcggttatctaccacggcgattccgaccagctgcgcgagctgtgcgagcaggtggcggcgcgcgacggggcgattgtctccgtgcagggtttcgcccgcggcgaaaccaatctgctgctggagcggctgtatatcgagcgttcgctgagcgttaacaccgcggcggcaggcggtaacgccagcctgatgaccatcggctaaaacgggctccccggtggcgctgcgcttaccggggctacctaccaccgccaaagggtagcccggataaggcgctgtgcgccgccatccgggcaatcagtctgcgctgcgatcagctaatgacagccgacgtcagctgtgtttaattaaggctcccggacgggagccttttttatgggagcagaacaatgaaacgcacgttatttgccgtgatggccctgctggccagcggcgcggcgctggcggacgagtgcagcagcgccaacacccaaaccgaaatgaatcagtgcgcggctgcgcagtatcaggcggccgataaaaaactgaacgacacatggcagcaggccctgcagcgggcggtgggtaaacaacaaacattactgaagcaggcgcagcaggcatggatcgccctccgcgacgccgactgcgcctttctcgcgtccggcgccgaaggcggcagcatgcagccaatgctggtcagccagtgcatgaccgataagagcgtggagcgggagtctttcctcgcctcgctgctacagtgcgaggatggcgatcaaagctgcccgctgccgcccgccaattaacggacgcgaatgccttcgataatcatccgctggacattatcgaccgtttgttcaaaaaaggccgcatcctgcagcgtggcgccggtgaccgcctccacctgggtggcgaagtcggcgtaatgctgggtggtagcccagatcataaagattaaatgctgtggatcgaccggcgccagcttgccgcggtcgatccagccggagactatcgccgatttctcatcgaccagcgctttcaggtccccggtcagttcgcccatcagcagcggcgccccctgcagcatctcgaggcagaagagcttcgaggcctgggggtgatcgcgggacacctccagcttcaggcgaatatattcgcggatcgccaccagcgggctgatatcctcacgaaaggccttcagcggcgccagccagatggcgaggatctgctgcaggactgccacatacagcgcctctttcgaagggtagtaatagagcagattggttttcgataccccggcgcgctcagccacctgctccagccgcgtaccgtgaataccaaattgcgaaaatgcctccagcgcggcggccaggatggcctcctttttggcgctgaccgcttgtgaacgtttgccgcttttcttcaccgcgccctgtgccatacatcctctccttcagttgacgccaccagcatagcaaaagccctgcgccgacacgaccccatgcaccctgattgcgcatgactgccgttttttcgtgcactgattttgaccatccagtccacttttttatcgtcctttttagcaactcaaaagtaacacattaataacattagcatttataaaactggcatcgcctttgctttaccttctctgcgaggtggtccagggagaggcaggatgccgcaccatcgcaacccatcttccatgactgcagagaggtaggtatgaaaattggtgttttcgttcccattggcaacaacggctggctgatctccacccatgccccgcagtatatgccgacctttgaactgaataaggccatcgtgcagaaggccgagcactaccatttcgacttcgcgctctccatgatcaaactgcgcggcttcggcgggaaaactgaattctgggatcacaacctggagtcctttaccctgatggccggcctggccgcggtgacctcgaagatccagatctacgccaccgccgccaccctgacgctgccgccggcgattgtcgcccggatggcctccactatcgactccatctccggcggccggtttggcgtcaatctggtgaccggctggcaaaaaccggaatatgaccagatgggcatgtggccgggagatgactatttcgccagccgctatgactatctcaccgaatacgtccaggtgctccgtgacctgtggggcaccgggcgcagcgatttcaaaggtgactacttcaccatgaacgactgccgggtcagcccgcgcccgtcgcagccgatgaaggtgatctgcgccgggcagagcgatgccgggatggccttctccgcccagcatgcggactacaacttttgctttggcaaaggggtcaacacgccaacggcctttgccccgaccgccgcacgcatgatgcaggcggcggaaaaaaccggccgcgacgtggggtcctatgtgctgttcatggtgatcgccgacgaaaccgacgaggcggcgcgcgccaaatgggaacattacaaagcgggcgccgatgaagaagcgttggcgtggctcaccgagcagagtcagaaagatacccgctccggcagcgataccaacgtgcgccagatggccgaccccacctcggcggtcaacattaacatgggcaccctggtcggatcgtatgccagcgtcgcccgtatgcttgatgaagtagcgagcgtgcccggcaccgacggcgtgctgctgacctttgatgattttcttgccggcattgacgcctttggcgaacgcattcagccgctgatgcgctgccgggaccacattgcttctgttacccgtgaggtggcctgatgattacccttcccgctcgcccggaatccctgaccttcgcgccgcagcagagcgcgctgattgtggtcgatatgcagaacgcctacgccagccagggcggttatctggatctcgccggctttgacgtctccgctacccggccggttatcgacaatattaataccgccgtcgccgccgctcgcgccgcgggtatgttgattatctggttccagaatggctgggatgaccagtatgttgaagccggcggcccgggctcgccgaactatcacaaatccaacgcgctgaaaacgatgcgtcagcgtccggagctgcagggcaagctgctggcgaaaggcggctgggattatcagctggtggacgagctgacgccgcaggaaggcgatatcgtgttgccgaaaccgcgctacagcggcttctttaacaccccgctcgacagcattttgcgcagccgcggcatacgccacctggtgttcaccgggatcgccaccaacgtctgcgtcgaatcgacgctgcgcgatggcttctttctcgaatacttcggcatcgtgctggaggatgccacccatcaggccggcccggccttcgcccagcaggcggcactgttcaatattgaaacctttttcggctgggtcagcgacgtcgagagcttctgccatgcgctgtcccccgccgccccgctggctttagccaaggagaaacgttatgcctaaacaggtgattattccgccaggcaccaccgcgccgattgccccctttgttccggggacgctcgccgatggcgtggtctacgtctcgggcaccctgccgtttgataagcaaaacaatgtggtgcacatcggcgacccaaaggcgcaaacccgccacgtgctggagaccatcaggagcgttatcgaaacggcgggcgggagtatggcggatgtgactttcaacagcatctttatcaccgactggacaaattacgccgcgattaacgaggtctacgccgagttcttccccggcgataaaccggcgcgcttctgcattcagtgcggactggtgaagcccgatgcgctggtggaaatcgccagcgtcgcccatatcggtaccccgacatgatgaggctcaatattgctccggctccgtggcccggcgcgccggtggtggtcctcagcgccggtctgggcgggggcggcggctactggctggcgcagcgcgcggcgctggaggaacagtatcagctggtgagttatgaccataacgggaccggggagaacgccggtccgctgcccgccgactacagcctggcgacgatggccggggagctgttcagcgctctgcaagcggcggggatcgcccgcttcgcgctggtgggccacgccctgggggcgctgattggcctgcagctggcgctcgatcgccccgaggcggtgagcgccctggcgctggtcaacggctggctgtcgctgtcgccgcatacccgccgctgcttccaggtgcgcgagcgtctgctgcatgccggcggcgcacaggagtgggtcgaagcgcagccgctatttctctacccggcggaatggatggccgcgcgcctgccgcgcctcgaagcggaagatgcgcttgccatcagccattttcagggcaaagagaatctgctgaagcggctacaggccctgaagcaggctgatttttcacgccgtgcggcggccatcgcctgcccgacgctgattatcagcgccgctgacgacctgctggtccccgcctcctgctcccgcgtgctgcagacggcgatccccggcagccagctcgtggaaatgccgtggggcggccatgcctgtaacgtcaccgacgccgatacctttaataccattttacgcgacgggctgtccgctatgctgccggtcgccagggagacccgatgaacgacgcaataaaccacacggcctgcgagacgctgtttacccaggcccggacccacaacggctggctggataagccagtgagcgatgcgcagctgcaggccgtctgggacctgatgaaaatggggccgacttctgccaactgttcgccagcgcgcatcgtgttcgtgcgcagcgcggaaggcaaagagaaacttcgcccgacgctctccagcggcaatctgcagaaaaccatgcaggcgccggtgaccgccatcgtggcgtgggatagcgccttctacgaccggctgccgaccctgtttccccacggtgacgcccgcagctggtttacctccagcccgcagctggcggaagagaccgcgtttcgcaacagctccctgcaggcggcgtatctgatttttgcctgccgggcgctgggcctcgacaccgggccaatgtccggttttgaccgggaaaaagtcgacgcggcattttttgccgacaacggctggaaaagcaacctgctggtgaacatcggctatggcgaccccggcaagctgtacggccgcctgccgcgcctgtcctttgatgaagcctgcctgctggcataaggagtttacgatggagttaacggacaaagcgagtttccgtgacgccatggcccacgtcggcgccgcggttaacattattaccaccgatggcccggcgggccgggcgggattcaccgccagcgcggtctgcagcgttaccgacacgccgccgaccctgctggtctgcctgaaccgctcggcttcggtgtggccggtgttcagcgaacaccacacgctgtgcgtcaataccctggcggccggacaggaggccctgtcgacgctgtttggcggtaaaacggcaatggacgagcgttttgccgccgccgactggcagaccggcgccaccggctgtccgcggctggaggcggctctggtcagctttgactgccgcatcgaccagcgcgtcagcgtcgggacgcacgacattctgttttgtcacgtcgtggccattacccgtcacccggagccccggggactgatgtggtttgaccgcggctatcacacgcttatgcgacccgcttgttaacctttaacccgggatatcatcatggcactcttcgattttcctcgctggaagctgacctctcctgccgccgaatccggcgttgtcgcccccgatgaacgcttgtcggccgggcaaacgctggtgatgggggtgcagcacgccgttgcgatgttcggcgcgacggtgctgatgccgttgttgatggggctcgacccgaacctgtctattctgatgtcgggcgtcggcaccctgctgttctttgtcgtcaccggcggacgggtgccgagctatctcggctccagcgccgcttttgtcggggtggtgatcgccattaccggctttaacggccaggggctgaaccctcatctgagcgtcgcccttggcgggatcatcgcctgcgggctggtctacactctgattggtctggtggtgatgaagatcggcacccgctggatcgagcgcctgatgccgccggtggtgaccggcgcggtggtgatggctatcggcctgaacctggcgccgattgccgtgcgcagcgtctccgccagcgccttcgacagctggatggcggtgttaactgtgctctgcatcggcatagtggcggtatttacccgcgggatgctgcagcgactgctgatcctggtcggcctgatcgtcgcctgcgcgctgtacgccctgctggctaacggcctgggccttggcaaaccgctggacttctcccccctcgcccaggcggcgtggttcgggctgccgcactttacccccccatcctttaacggccaggcgatgatgttgattgcgccggtcgcggtgatcctggtggccgagaacctcgggcacctgaaggccgtcgccgggatgaccgggcgcaatatggacccgtacatggggcgcgccttcgtcggcgacgggctggcgaccatgctctccggttcggtgggcggcagcggggtcaccacctatgcggagaacatcggcgtcatggcggtgaccaaggtctactcaacgctggtgtttgtcgccgcggcgctgattgccatgctgttgggtttctcgccgaagttcggcgcattaatccacaccattcccgggccggtgatcggcggcgcctcgatcgtggtctttggcttaattgccgtcgccggggcgcggatctgggtgcaaaaccgggtggatctgagtcaaaacagcaatttgatcatggtgtcggtgaccctggtgctgggcgccggcgatttcgcgctgtcgctgggcggctttacgctgggcgggattggcacggccaccttcggggcgatcctgctgcatgcgctgcttcatcgcgggacgcgcgaggcgaaggaggccagggtaacgccggtgtaagccacattagcgcggcgttggcgcagggagcggtgtgggcctgggtggtgtgatcctgtaggccggataaggcatttatgccgccatccggcaccaccacgggcacggaacctgaccgcccggcggcgctgcgcttgccgggcctggagactgccacggccttccgggaacgtctcagcgattttgaggccgtcagcaccggcagtttcagcaacaatggtgaataaattaacggcaggtcgtacgaacgtaggccgggtaaggcgcagccgctacccggcataaaagcgacgccgtgcctagagccatcgcccggcggcgctgcgctggcacgggcctggagacaatcagagccggacgagtaccagccaggataagcgccgctgtcgggtcagaaggaaaatattatggctcgcggcgatcggccagatccgtgagcggctgcgcatcgtcgtttgtggaaacctgcggcggcgacttgcgcttccacttcagctcgctcaccagcacccccgcgaggatcaaaacgcagccgagcagagccagcagcggcagacgctcaccggccagccggccaaaaataccggcccataccggttcaccggtataaataagggtggcccgcgtcggcgagacgctgcgctgcgcccagttcatggtcacctgaatgatcgcgctgaaaatccccagccccagcgcgacgccgagcagggccggcgtcaacgacggcaccgattcacccgccggcttcatggcggcgaaagccaccagcgacgcggtcgccagctgcaccaccgtcacccggcggacatcgacttttccggcccaggcgctgataaggataatctccgccgcgattgccaccgcgcttgccagagtgatcatttcccccacgccaagcgccagcagattattttccggcccggccagcagaattaaaccaataaaggccagcacaatccccacgcaggacatcacccccggcatacgtcccaggcacagccactgcagcagcggcaccagcggcacatacatcgcggtgataaaggcagatttactgctggagatggtctgtagtccccaggtctgcaggccataccccagcgcaatcgccacgccaatcgctaccccggccttcacctccagccacgtcagaccgcgcagagtgcgcagcgaaagcaggcccaccgccagcgcggcagtcgcaaaacgcaaaccgacaaaaaacagcggcccgctgaggctcaccgcgtactgtacggcaaggaacgtccctccccagaacatggtgatcatgataaggagcgcttcctggcggctaacggagaattttaacgaagacataagacagccatgacgattaacgggcgaccagtgtgcaatccgcccggcgggagcgcaaccaccgacagataaaaaaaccgccggcagatgccggcggcgagggcgatgcggttgggtcggggagattaacaccgcatcaaagagaacagtgcgagtcgcgcgttaactttcacgactaccatgactgtttttacccccttttttgccagcctctgaggcgcgctgagggtcatttttaaaattccccccgctatgctggccacctttacgtcctgcttctgatgctctttcacggtcttcggcaaagttgccggaaccgccacgatggtttgccattactgacctccattaggttagacatcatagtgcattacgcgggagcggcgacgccgctgtcctgccgcgtatctataaggttagtgaatgactgcggctgacggcggcgaatgtaatatccagaaacaaagccgggcgaaaaaagcttcctcgcgccgcgaacagctcctaaccgactctgctggcgaagaaaaaatagtcagcaaaaatgtatcctgatgctacatcctcgccgcagcggccaaaatagcaggcgcaacgcttcctccttcacttcctttcaggccgcgcggtgcaaggaaaagtaaataacgctttgtcattttgttataaatcaaacaaatgcccgttggatttgcactctccggcggaggctttatctttaaaggtaccagctattttgctggcttataatgcaaccgaggagtgatggaaatggctaaaattctggtgctttattattccatgtatggacacattgaaaccatggctcacgccgtcgccgatggggcgaaccgggtggacggcgttgaggtggttgtgaagcgcgtgccggaaaccatgcaggctgaagcattcgccaaagcaggcgggaaaacgcaaaacgcgcccgtcgccacgccgcaggagctggcagagtatgacgccatcatctttggtaccccgacgcgcttcggcaacatgtccggtcagatgcgtactttcctcgatcaaaccggcggtctgtgggcgtccggcgctctgtatggcaaaatcgccagcgtatttagctcaaccggtaccggcggcggccaggaacaaaccattacctcgacctggacgacgctggcccaccacggcatgatcatcgtcccgatcggctatggcgcccaggagctattcgatatctcccaggtacgcggcggtaccccttatggcgcaaccaccatcgccggcggcgacggctcgcggcagccgagcgaggaagagttagccatcgcccgctatcagggtgaacatgtcgccaaactggccgttaaactgcacggctaatcttctgcaggaggagcactatgccaactcaagaagcaaaagcacatcgcgtcggcgaatgggcaagtttacgtaacacctcaccggaaattgccgaggcgattttcgaagtcgcccactacgatgagaaactggcggagcaaatctgggaggaaggcagcgacgaagtgctggcgctggcctttgccaaaaccgataaagacagcctgttctggggcgaacagacgattgagcgtaaaaacgtctaggaggtttatccccacctgggctcatcctaacctgctaaaaaaacccggagtgctccgggtttttttcgttatttcgccgcctcgttgatcacctttttaaaggtctccagcgggcagaatccctggtcatcaaccggacagccgttaagcgccagagtgacccgctgcggcggggcctgcagggttaacgcgtcggcgttacgcagttgctcggtactttgatagacatactcaatcttcatcagatcgcgattgccggcgctgtcatgccagcgctgaaacagcagtttgccgccgataggagtgcgctcatactggccgggcagttgatagggcttaaagtccagggcggtgagcagcgaagcgatattcgagtcgtgtcccaccagcagcgtgactttcgccttgctggctccctcgcccaccagcgcgttatcgatatatttaaccagcggtttggcgacgttttgcgccaccgccaccgaggtaaacagactatcctgatagccatttttcagcttcgacagcactcgccactgcttatcgctggcgatctccccccacgccacctgatctttcgggaagccttcataatattgcagggtgaaggcgtctaccagcgagttgcccaccttcaacggtccggacactcccggctcctgctgataaccggcgctaaaggtatctttaccctcgctcagggaacagaccttcttctctttgcaggagggcgagttgcggtaatcgatcatcgtctccagcagcttgtagctctcggtcaactgcattccctggcgctctttttccatcgcctgcagcgctttctcgcgaaacgccggggagtcgtcggtaataaccgggttgaaggtcgggtccatggtgcccatctgaggctggtgatgcaccgggatgccgcagcccgggaacgcgccggtgataaagaactgcgcggtggcgacggtgcgctgcaggctgttagcgtaggcataaaccgcgttttccggcgggcactcgccgctggtcaccagcttctgctgcgccagccattcgcgcatatagtggcccatatacacctccagcacaccgcctttggtggtcagctggccgcccggcacatcccactgcggccaggccttggcggtggactgctccagcacgctgccgttattggccaacggcgcacgcaagttgtgacgactcatgatcagcacctgctgcagctgatacccctccggggcggccgtgtcctgcgcctgagcgccagcggataacatcaccgcgccggcaacggcggcggcaagtagacgttttttcatcccttcatccttagtcatttattatcatcgcgttaattgtgccggatttatgacatttttcctggtaatcgctcgcaaacttagaccgtagccgaaaatttcccctgcagggcaaagagttttataatgaaacaattaacctggaggctttcgtgaaacgtacccgtctggaaaacagctgttgccctatcgcccgctccctcgacgttatcggcgactggtggtcgctgctgatcgtccgcgatgctctgcgcggggtgcgccgttttagcgaattccagaaaaacctcggtatcgccaaaaacatgctcgccgggcggctgaaaatgctggtggatgaaggcatcctgcgcctgcagccggcctccgacggcagcgcctggcaggagtatgtcctgaccgataagggccgtgccctgcaaacggtgctggtcgccctctcccagtgggcagacgactatctgttcgatcctgacgaaccggcgacccggctcattgaccgccagcagcgccagcccctgcgtaagctggtcctgcaggcggcggatggccgtgagctggccccggcggacatcaccatcgctatcccgctgaacgactaaacgctgcccgcgacaggcaaaaatgaaaaagtcctggcaaaatggttgcattattaaacctaatatctcatgctgaatttggtttaataatgcaaccttttacgaggcatttctcatgacccaaccatcgcacacagcttttatcaccggcgcgtcctcaggtatcggcgcgatctatgccgaacgactcgccgcccgcggctacaacctgatcctcgccgcccgtcgtgaagaccgtctgcaggcgctcgccgaccagctgcaggcgcgctacgccatccaggcaagcatcctcaaagccgatcttagcgaagagcacgggattgccgccgtagagcagcgtctgcagcaggatcccgccatcgacctgttcattaacaacgccggcaccgcgaaattggcgggttttctcgccagtacgccacgcgagcaccaggcgattcatacgctcaacaccaccgcgctgctgcgtctgagctatgccgcgctggccgctttcaccccacgacgccgggggacgctgatcaatattgcctctatcctcgcgctgcatacgctgccgggcagcgcagtctacagcgccagcaaagcctgggtgttgagcttcacccgcggcctgcaggaggagtttgccgacagcggcgtgcgtattcaggcggtattgccggcggcgaccgctaccgatctgtggccgacctccggcgtggcgctggacgctctgcccagcggcacggtaatgaccaccgaggatctggttgacgccgctctcagggggctggagatgggggaacaggtcaccttaccaccggttcatgacctgggactgtgggagacttttgagcagtccagactggcgctgtttaccagcgcgcgaaccggacagcctgcgccgcggtatcgataagcggcaccgtgcggcgggcgctactccggtagcggaaccgccgtcagggtacagatcgcctcgtgctcgccgccgcggcgatcggtaatcaccaccttatcgcccgcctttttgccttcacacggcttgaggacctgctccacgatccgctcgcggctcgcctgacgttcactttcagcctgactggcgaaggcagacagcgccaacgctacgcccagcaggctgagggttttcttatacatgactgactctcagatcgttcttattcgcggtcagcgtaactcgctgtaggccacacttctgtaaaatcacttaacggagtgttacgccatttcaggtgaaacccaggcggtcacatccctgcgggaaatattttatcacaaccccgccgccggatattctcgcgatgaggcgtcatctttcagacatatcccgatgttatcttcacacagagccctgtatctttttccctttccaaacagaatattaggttggtctatgtcgggtcttattctctttatcgtcgcggtggcgctgctgggcgtcgccatctacagcctggtgtcgtacctcaaagagcggcgcgccagtcagttacctgtccataaaaagaagaaataataccttccgttccccaccgttttctgctgatttctttaccgtcctgtactgtcccttaccgaagccaaaacgaaagcaggcctgcgggcctgccttcgttcagtttatgcctcagaacctatgactcccaggcctgctccgctttagcggcatcaaactgcggcggcggtttgcggaagcgtcgggtcagataagtcaggtacagcagaccaagcgccgcccacaccaggccgagcgtcagggaggtggcctcgagattgatccacaataccccgaccgtcaacgccccgaccatcggcagcagcagataatgcagtcgatccttccaggttttgttgtaccccttgcgccgccagaagtggttgaacaccgacaggttaacgaaggtgaaggccaccagcgcaccgaaattaatcaacgcggtggcggtcaccaggtcgaagaacagcgccgacagcgcaacgatgcccaccataatcacgttcagcgccggggtacgccatttcggatgcacatagccaaaaatgcgctccgggaagacgttgtcgcggcccatcacgtacagcagacgggagacgctggcatgggaggccaggccggacgccagggtgttaacaaaggtggtgcacaggaaaatcgactggaacagcttgccgcccacgtacagcgcaatctccggcagcgcggcatcggggtctttaaagcgatgaatatccgggaagaacagctgcataaagaacgacgcgacgataaagataatgccgccgtacatcgcggtgagaaaaattgccttcgggatcacccgcgcggcgtcaggggtctcttccgacagggtggtcaccgcgtcgaaaccgagaaacgagaagcagacaatggtcgcgccggtaataatcgggatcagatgcgcattctggctgataaacggctgcagcgaccagacggtacccaccccctcgcctttatgcagcccctgcaccaccagaatgacaaacaccaccatgatcgaaatctgcaccagcacgaacagggtattgaagttggccaccaggttaacgcttttcaggttcgcggcggtcagaatagcgacaaaggtcactacccacacccacggcggcacttcggggaacaaggccgagagatagatcttcgccagcaggacgttgatcatcggcagaaacagataatccagcagcgacgaccaaccgaccataaagccgacgtgcggactgatggatttttgcgcgtaggtataggcggaaccggcctccggaaactgacgcaccagtttgccgtagctgatggcggtgaacagcacgccagccagcgccagcagataagacgccggaacgtggccattgctgatgcccgagacgatgccgaaggtatcaaacaccgtcattggcgtcagataggccagccccatcatcaccacttgccagagtttgagggatttacgcagacgcggtctgcccgcctgagcggcgttatgcgcaggaggattaatagccatcgcccatgccccccttgctgttaacagtttgcgggcccaacgtccgcgtgacaaacctgcttagcaaaggggtaaggcgtagataaaagggtaagacggaccggtaagcggtagctggctggcatccaatgcggcctgagcggcctccctctccctgcggatatttgaacatctgcatcatctcatttcctcgtcacacactgtgtcgttaactgaagccccgttgccgcctgcgctccttaacgcgacatccgggaaatggctgggctcccagcaaaaacgtcggccaggctccgctcaggccgtatgatgctactgattaccaaacttatgggcccctcgcggggcgaccatcaggcgtttttcaacatccactcaatttcggtttctgtgataagacgctcaaactgcagtaattcatcatgcttacaggcatggaaaacatggcagaaacgctcgccgaggcgctcacgcaagtgatcgttctgcataaactcccacagcgcatcgctctggcggatcgggaacggcaggccctcttgttccagaccgttaccttccacctcttcctgtaaaggcagctgggggttatccagcccgtgcagaatgccggcgaaaatcgccgccatcaccagatacgggttggcgtccgcccccgcgacgcgatactccacgcggtggttctgccgctcgccgcacggaatacgcagcgcgacggtgcggttgttatgcccccacgaagcctgcgtcgggacgtacatccccggctggaagcggcgatacgagttcacgttcggcgccagcagcgccatcgaggccggcatcagatcgatcatcccggccagcgcgcgtttgagcagcgcagagtcttccccatcgccgtccaccagcacgttttcccctttattgttcagcatgctgatgtggatatgcatcccactgccggcatgctcttcataaggcttcgccataaaagtggcgtgcatcttatgcttctccgccatcaaacgcacgagacgttttaacgccagcgcatcatcgcaggcgtccagcacgttatcggtatggtgaaggttgatttcaaactggcccggcgaggcttccgccaccgcgccatcggcggggatcagctgcagtttggccagctcgtcgatgtcgttgagcacgtcggcgaagtggttaaggttatcgaccgagtagacctggctttgggtgttgcgatcgtcagtgcccggcgcacacggcggctgcaggtagccttcggcatcgcgtttgcggtccagtaaatagaactccagctctaccgctaccacggggaacagcccgcgctggcgcaactgctgccagaggcggttgagtacgttccgcggctcaacgtcaaagggagcgccatcttcatcaaccatggttagctgtacctgggctatcgattgtgggtcagccgccgaaggggttaaggtgccgggtaccgggatgcagctgcgatccggctcgcccatctcctggcccagaccggcctcttccaccacattgccgagaatatccatcgcaaacaccgaggccgggaaataacagcctttctccagtttgctcaggccggcaaccgggatgcgcttgccgcggaagcagccgttcaggtcagtgaggaggacatcgacatactgggtatcagggtaggtttcgaggtagcgcttcacttctttcgcgaacgcgctaacccgtctctcttccgtttgctgaacaaaattctcaacttctacgatattggtttccatgattcaccgccgttggttgggtttcggtcctgcactcagaccgttaaatataatgtccaccccatcgactgtgtatgcaaataaattgtttgtcaaatgttaaattaagtttgcaaagggctatttccactgctagattgagaaaatattgaacgatatggccgttaaacccgctatagcggtcataatttagtccactttgtgagggcgatcatggaaaatataatgtacaagccagttattggcgtcgtgatgtgtagaaacaggcttaagggtcaccagacccagaccttgcaagaaaagtacctgaatgcaattgtgaacgccggcggactgccgattgccctgcctcatgcgctggcgaagccggagctactgaacgcggtcgttgataaactggacgggatctacctgccaggcagccccagcaatgtgcagccgcacctttatggtgaaaacggcgatgagcctgacgccgaccccgggcgtgatcttctgagcatggcgctgattaacgccgcgctcgaaaggcgcatccccattttcgccatctgtcgtggactgcaggaactggttgtcgccaccggcgggactctgtatcgtcgtctgttcgagcagcctgagctccttgaacatcgcgaagatcctgaactgcccgtcgagcagcagtatgcgccgtcccatcaggttgaggttcaggaaggaggattgctgtcgcaattgataccgggctgcaacacgttttgggtaaactcgctacatgggcaaggggcaaaaaccctcagtccgcagctgcgcgtggaggcgcgagcgccggatggactggtggaagcggtcagcgtgaacgatcatcctttcgcgctgggcgtacagtggcatccagaatggaacagtagcgaatacgccctgtcgcgtatgttgtttgatggttttatcaccgcctgtcagggccatcatgctgaaaagcggcggcgctgaccactaccgttaaggaaatgcaaatatgagcgatgacggactggcgccagggaaacgtctgtcagagatccgccaacagctgggtctctcacagcgtcgtgccgccgaactgtctgggttaacacatagtgccatcagcaccatagagcaggataaagtcagtcctgccatcagtacgctgcaaaagctgctgaaagtctatgggctgtcgctctcggaattcttttctgaacccgaaaagccggatgaaccccaggtggtcattaatcaggatgacctgattgagatgggaagtcagggcgtttccatgaagctggttcataacggaaatccgaaccgtacgctggcgatgatttttgaaacttaccagcctggaaccacgaccggggagaggattaagcatcagggtgaggagataggcaccatactggaaggtgagatcgtgctgaccattaacggtcagtcgtaccacctggtggctggacagagctatgccattaataccggcattccgcacagcttcagcaacacctcggcaggcatctgccgcatcatcagtgcccacacccccaccacattctgattatttcgcctgaacgaggttcaggcttacttcaggcctgtcgcgacggaaaatctattttcgtcgcggcgaagaactcgtagtaataacgtctgcgccgtacggaatattatttcctgttggccctgaaataattaacgccagtgaatggcgtctcgctcctgaataattcgggttgcaaacaacccgtcaaaactcaggagaataaaacggtattcaactccggggatacgctatgccctgcgcccggcgcagtgcccccgtgcagcctgaaaacgccgcactgattaatttgccgataatgtttttaaggagtcatgatgaattttcagcacctggcttactggcaggaaaaagcgaaaaacctggccattgaaacgcgcttatttattaacggcgaatattgcgccgcggccgataataccacctttgagactatcgaccctgccgcgcagcagacattagcccaggtcgcccgcggtaaaaaagccgacgtcgaacgggcggtgaaagccgcgcgccaggcttttgataacggcgactggtcgcaagcctctccggcccggcgtaaagcggttctcactcactttgctgatctgatggaggcccatcgtgaagagctggcgctgctggaaacgctggataccggcaagccgattcgccacagcctgcgcgacgatattcccggcgccgcccgcgccattcgctggtatgccgaagcgctggataaagtctatggcgaagtggcccccaccggcagcaacgagctggcgatgatcgttcgcgaaccaattggcgtgatcgccgcggtggtgccgtggaacttcccgctgctgctggcctgctggaaactcggcccggcgctggcggcgggcaatagcgtaatcctcaaaccctcggaaaaatcgccgctcaccgccctgcgtctggccgggctggcgaaagaggccggcctgccggacggcgtgttgaacgtggtcagcggctttggccacgaggccgggcaggcgctggccctgcatcctgatgttgaagtcatcaccttcaccggctccacccgcaccggcaagcagctgctgaaagacgccggcgacagcaatatgaagcgcgtgtggctggaagcgggcggcaagagcgccaacattgtcttcgccgactgcccggatctgcaacaagcggttagctccaccgccggcggcatcttctacaaccagggacaggtgtgcatcgccgggacccgtctgctgctcgaggagagcatcgctgacgagttcctggcgcggctgaaagctgaggcgcaacactggcagccgggcaacccgctcgatccggacaccaccatgggcatgctgattgacaatacccatgccgacaacgtgcatagctttattcgcggcggcgaaagccaaagcaccctgttcctcgacggacggaaaaacccgtggcctgccgccgttggcccgaccattttcattgacgtcgacccggcatcaaccctcagccgggaagagatcttcggcccggtgctggtggtgacccgcttcaaaagcgaagaagaggcgctaaagctcgccaatgacagcgactacggcttgggcgccgcggtgtggacccgcgatctctcccgcgcccaccgcatcagccgccgcctgaaggccggctcggtcttcgtcaacaactataacgatggtgatatgaccgttccgttcggcggctacaagcagagcggcaacgggcgcgataaatcgctgcacgcactggaaaaattcaccgaactgaaaaccatctggattgccctggagtcttgatcatgactgaacataccactagctactatgccgccagcgccaacaagtatgaaccgttcccgacgctggagggatccatcaactgtgacgtctgcgtcgtcggcggcggctacaccggcctctcgtctgccctgcatctggccgaaatgggctacgacgtggtggtgctggaaggggcgcgcatcggcttcggcgccagcggccgcaacggcgggcagctggtcaactcctatagccgcgatatcgacgtcattgaaaagaactacggcccggatgcggcaaaaatgctcggcagcatgatgttcgaaggcggcgatatcatccgcgaacgcatccagcggtatcagatccagtgcgattaccgcccgggcggcctgttcgtggcgatgaaccataaacagctggaaaccctggaagagcagaaagccaactgggagcgctacggcaacacccagctggagctgctggacagagaggccattcgtcgcgaagtggacagcgaccgctacgtcggcgccctgctcgaccacagcggcggccatattcacccgctgaacctcgccatcggcgaagcggatgccattcgcctgaacggcggccgggtgtatgagcagtcgccggtcacccgcatccagcacaccagcccggcggtggtcagcaccgcgcgcggccaggtcaccgcgcgctacgtgatcgtcgccggcaacgcctatctcggcgataaactggagccggagctggcgaaacgcagcatgccgtgcggcacccaggtggtcactaccgctccgctgtcggaagaggtcgcccgctcgctgatcccgaaaaactactgtgtggaagactgtaactacctgctggactactaccgtctgaccggcgacaaccgtctgctgtacggcggcggcgtggtctacggcgcgcgcgatccggacgacgtggagcggctgattatgccgaaactgctgaaaaccttcccgcagctgcagggggtgaagattgactaccgctggacgggcaacttcctgctaaccctgtcgcggatgccgcagttcgggcgtctcgataacaatatttactacatgcagggctacagcggccacggcgtgacctgtacccaccttgccggacgcttgatttcagagctgctgcgcggcgacgccgagcgtttcgacgccttcgccaaactgccgcactacccgttcccgggcggccgcagcctgcgcattccttttaccgccatgggcgccgcctactacagcctgcgcgaccgccttggggtttaatcgcctctgccgacggcgctggccgtcggctcatgctgcggatagtgctgctgaaagtagtggcgcagaaactccacggtagtgcgaattttagccgacgtcgccagccgggagacgtaaaccgcccagacgttggccggctgccagtagtccggcagcacctgcaccagatgtccgctggcgatattctcccggacgtcccaccacgaacggagcgcaatcccctgcccgtccagacaccactgatgcacaatttcaccatggttggaggagagaggcccggttaccttgatggcgtgctggccctctttgctatgcaattgccagacgccgaacgggtgatcgcgctctttaatcaccaggcagggtaacgcggccagatcgctcagctgtttcggcgacgcatggcgggcaaggaactgcggcgaggcgcagagtacgcggtgattggccgccagctggcgggcaatcagattcggtgcgatatcgtcgccgacgcgaatatcgagatccaccccttcattgactaaatccaccagccggtcctggacatcgaaacgcagctccagctgcgggtactggagagccagcgccgacagcgccggggcgacaacccgacggccaaagccgaagctactgataatacgcagcgttccctgcggcacctggcgcacgtcggaaagctcatccatcatctcatcgacatcctgcaaaatgcgctgcgcccattcatagatccgctccccctcttcggtaatggtgacccggcgggtggtccggtgcagtaacatcacattcagggtttgctccagcagcgaaacccgcttgctgacgaacgccggcgatacgccaagctcctcggcggcggcggcgaacccggcccggcgagcgaccagcataaagacgcgtaaatcatttagcagcggcagattattcatgatctgtgttttatgtttcaccagttagcgtgattaattatgaaccagtcaattataggataggcaggtggtcaaacatcatcgttaaaaagtgagaaccggaatgaaaaaaacctgtcgtattgccgccatcccgggtgacggaattggcaaagaagttctgcctgaagggattcgcgtgctgcaagccgccgcacagcgttgggatctgtcgctgagcttcgagcagatggagtgggcaagctgcgaatattatgcccatcacggcaagatgatgccggacgactggcgcgagcagttgcagggcttcgatgccatctacttcggcgccgtcggctggccggataccgttcccgaccacatttcgctgtgggggtcgctgctgaagttccgccgcgagttcgatcaatacgtcaacctgcgcccggtgcgcctgttccccggcgtcccctgcccgctggcgggtaaaaaggccggcgatattgatttttacgtggtgcgtgaaaataccgaaggcgaatattccgccctcggcggccgcgccaatgaaggcaccgagcatgaagtggtgattcaggagtcggtctttacccgccgcggcgtggaccggatcctgcgctacgccttcgaactggcgaaaagccgcccacgcaaaacgctgacctccgcaaccaaatccaacggtctggcgatcagcatgccctattgggatgagcgggtggaagagatggccaaaaactatcccgaaattcgctgggacaagcagcatatcgatatcctgtgtgcccgtttcgtgctgcagccggagcgtttcgacgtggtagtgggttctaacctgttcggcgatattctctccgatctcggcccggcctgtaccggcactatcggcattgcgccgtcggccaatctcaatccggagcgcaatttcccgtcgctgttcgaaccggttcacgggtcggcgccggatatttacggtaaaaatatcgccaacccgatcgccaccgtttgggccggggcgatgatgctcgatttcctcggcaacggcgatgagcgctaccacgccgctcacgatggcattctggcggcgattgagcagacgatcgcctgcggaccgaaaactccggacatgaaaggcagtgcctcaacgcagcaggttagcgaggctatctgcaaggccattttggcgtaattactccgccgctccccggtggcgctgcgcttaccggggctacaatcgcgcgataatgtagtgtgtaggccgggtaaggcacagccgccacccggcaaaaaaaacggcacagcaagtagcccgggtaaggcgcagccgctacccgggaaaacccgcgcgcctggtccgccaactcccctctcttttcgctatgcagaatcccccacgattgacaagtgaaccgcatcacagcggtgaactttattaattcctgaaaggacagaacctgcgccaattcaccttttattatttccgtttcgtgttttattgcttcacgaaacggccaattgtttaattcatgtaacgaagaaataatccaattgttaatagcatcttgctacgaaccctgaccctacagcgtgataacaacgacaggctaaagccaccgacgggcaatcatgcccaggagatcactcatgttgagcaacgtaaagaaaaaagatgtgccgctgattgccatcagcctggcggccattgttttcatcgccgctacattaagtctcttcccccagcaaaccgcgcaggcagctgattcgatttttaacggcgtgacccgcctgctgggttccacggtacaggtactggtgctgctggcgctgggactggtgttgtatctggccaccagcaaatacggcaatatccgtctcggcgaaggtaaagtcgaatacagtaccctctcatggctgtttatgtttatctgcgccggtctcggctcctccacgctgtactggggcgttgccgaatgggcttattactaccagaccccgggccttaacattgccccgcaatcgccgaaagcgctggaatacagcatcccttactctttcttccactggggcgtaagcgcctgggcaacctataccctcgcctcgctgatcatggcctatcacttccacgtgcggaaaaataaaggcctcagcctctccgggatcgtttcggcgatcaccggcgttaatccgcaaggtttctggggccgtctggtcgatctgatgttcctgatcgctaccgtcggcgcgttaaccatttcgctggtagtcaccgccgccaccttcacccgcggcctgtcagcgctgacaggactgccggataacttcaccgtgcaggcatttgtgatcctgctctccggcggtattttctgcatgagttcgtggattggcatcaacaacggcctgcagcgcctgagcaaaatggtcggctggggggcgtttctgctgccgttggtggtattactggttggcccgaccgaattcatcaccaataacgtcattaacgccgtcggcctgacgacccaaaacttcctgcagatgagcctgtttaccgacccgctcggcgacggcgcctttacccgcaactggaccgtcttctactggctgtggtggatctcctacaccccaggcgtggcgatgttcgtcacccgcgtctcccgcgggcgcaaaatcaaagaggtgatctggggactgctcctcggtagcaccgccggctgctggtttttcttcggggtgatggaaagctacgccatgcaccagttcgttaacggcgtgattaacgtaccacaggtgatgcagactctcggcggcgaaaccgccgtccagcaggtcctgatgtcgctgccggcaggtaagctgttcctcgccgcctatctgttcgtgatgattgtattcctcgcctcgcacatggatgcggtggcctacaccatggcggcgaccagtacccgcaacctgcgcgaaggcgaggatccggatcgcggcatgcgcctgttctggtgcgtggtgatcaccctcatcccgctgtcgattctgtttaccggcgcttcgcttgagaccatgaaaaccaccgtggtgctgaccgccctaccgttcctggccattttactgattaaaaccggcggcttcgtgcgctggttaaaacaggactacgcccacgttccggtccatcagatagaaacccatacccccgagcccattattaaagccgagacgctgccggttggcgcggtactcaaaggcgacggccagtcgctgtaaaacctcttactgacaataatcacaaggagaccctacatgagcaatttgagccctgacttcaccctgccgattaacttttgcgctaatccgcaggatgcctggaccattccggcccgtttttataccgacagccaggcgtttgagcacgagaaagagcgcatcttcgccaatagctggatttgcgtcgcccacggcagcgaggtcgcccggccgaacgattacattacccgggagatcatcggcgaaaatatcgttatcgtccgcggccgcgacaacattctgcgcgccttctataacgtctgcccgcaccgcggccaccagctactgagcggcgaaggcaaagccaaaaacgtgattacctgcccctatcacgcctgggccttcaagctggacggcaatctcgcccacgcccgcaactgcgaaaacgtggcgaatttcgatagcgaaaaggcaacgctggtgccggttcgcctggaagagtatgccggctttgtgtttatcaatatgaatccggaagcggagagtgtggaaacgcagctaccggggctgcaggacaaagtgctggaagcctgtccggacgtgcatgatctgaaactggcggcgcgctttaccaccctcaccccggcgaactggaaaaatatcgtcgataactatctggaatgttaccactgcggtccggcgcacccgggcttctcggattccgtccaggttgaccgctactggcacaccatgcacggcaaatggacgctgcagtatggcttcgccaaaccgtccgagcagtcgtttaaattcgaagagggtaccgacgccgcgtttcacggtttctggctgtggccgtgcaccatgttcaacgtcacgccgatcaagggcatgatgaccgttatctatgaattcccggtggatgaagagaccactctgcagaattacgacatctatttcaccaacgaagagctgactgacgatcagaaagcgctgattgagtggtatcgcgacgtgttccgcccggaagatttacgcctggtggaaagcgtgcagaaggggctgaagtcccgcggctatcgcggccaggggcgcattatggcggataacagcggcagcggtatctccgagcacgggatcgcgcatttccacaatctggtcgcccaggtattccagccgtaattattgaaggagttggccatgtccgtatttcactcaaatctgtttcgccagcaggcgctgattgccggaagctggcgcgacgccgcagacggtacaacgcttgccgtcagcaatccctccaccggcgcgacgctcggccagatccccaatatggggcgtgcggaagcgcaacaggcagtggatgccgccgcggccgcgctgccgggctggcgcgcgttcaccgccgcccagcgcgccgcgctattgaaaaactggcaccgcctgatcctcgaaaacaaaaccgcgctggcgcagataatgaccgccgagcagggcaagccgctggcggaagcggaaggcgaaatcgcctatgccgcctcgtttatcgagtggtttgccgaacaagggaaacgcgccaacggcgagataatcccctcccccggcgccgataaacgcctgatggtgatccgccagggggtaggcgtctgcgcggcgatcaccccgtggaacttcccggcggcgatgatcacccggaaggccggcccggcgctggccgcgggttgtacgatggtgattaagccggctaacgaaacgccgtttaccgcgctggcgatggcggagctggcgaatcaggccgggatcccgcagggcgtcattaacgtcgttaccggccagtcgcgagaaattggcgcggtgttcaccggcgatgagcgggtgcgtaagctctcctttaccggttcgaccgaagttggccgcgtgctgatgcgccagtgcgcggaatccatcaaaaagctctccttagagctcggcggtaacgcgccgtttatcgtctttgacgacgccgatatcgataaagcggtcgagggcgcgctgatcgccaagttccgcaacgccgggcaaacctgcgtctgcgtcaaccgcttctatattcatcgcgccgtctacgaccaattctgcgataaattcgtcgctcgcgtcgccgccctgaaagtgggcgatggcagcgagtccgatgtacagattggcccgctgatcaacgccgacgccgggcgcaaagtgcagtccctgctcgacgacgccctgagccgcggcgccacgctgttaactggcggtaaagcgcatccgctgggcggtaatttcttcacccctacggtgatcggcgacgtacagccggggtcattgctgctgcaggaagagattttcggcccggtggccgctttggtgaaatttgacgatgagcagcaggtcatcgagcaggcgaataacaccatctacggcctcgcctcctatttttacagcaacgatgccgcccgtatctggcgcgtctccgagcagctggaatacggcatggtcggtatcaataccgggctgatttccaacgaagtcgcaccgtttggcggggtaaagcagtccggtcttggccgcgaagggtcggaacacggaatcgaagattacctggagatgaagtatctctgccaggggttgtaaatgtgctctcccggcgatggcgctagccacgccgggattttttgatggagttcagcgatgtctgattatcaaatgtttgaggcggtcgttcgcgatgttgaacagatcacccctcttgtgaagcgttttacgctggtgtcgccgaccggcgccccgctgccggcattcagcggcggcagccatattatcgtccagatgcaggatggcgagcagcgctacagtaacgcctattcgctaatgagctcgccgctggataccaccagctggcagattgcggtgcgtcttgagtcgccctccaaaggcggctcgcgttttatgcaccagcgggtgcgcccgggcgataccctgacggtgtccacgcccaacaatctgttcgccatcgaaccacaggcgcgaaaacatctgctgatcgccggcggcatcggcattacgccattcttatcgcatattccggaactggaacagcggcaggccgactggcagctgcattactgttttcacgacgccgacagtaatgctttcgtcgatgcgctcagcgcagcgccgtggcgcgatcgggtcaatgttcatgtatcagcgctcggcagccgtctcgacctgccgcgcctgttcgccgacctcgagccaggaacccacgtgtatacctgcggcccagcggcgcttaacgaggcggtgaaagccgccgccgaacgccatcaggtgcccgccagccagctgcactttgagcagtttatccttgaggataaaagcggagaggcatttaccctggtgctggcgcgttccggacgcgaatttaccgtgccgcaggatatgaccattttgcaggtgatcgagaataacaaagcggcaaaggtcgaatgcctgtgccgagaaggggtgtgcggcacctgcgaaacgatgattctggagggggaagccgaccaccgcgatcagtattacagcgaggaagagaaagccagccagcagagtatgctgatctgctgctcacgcgccaaaggcggccggttagtgctggatttgtaaagcgcacaccggcaaaacggcggtgagatggactgaccccgcggaattgttccaacgtactaccactccatggcgacgaggtcagtggcgcggatactatcggcttcatcctccgcctgattagctttctgtgcggcaccggcgatagccggcgccgcctgctcagggattagccgctaaatacccgcgccttgccgctgaccgtcagtcgcaccatcgcgccgggctgccacgcggcctggctgacggtgcgatcgccaagaaacaacgccgtctcttcatccaccggctgcgagtgattgccttttccctggcgctgatggtatttcttgctggcgtgttcgtcatttgctggcaaccgggtcctgacacttagccctgagtctttgcctgatgaccctctgttactgctcccggccagaatgatggttaataagcggccggtgctgatctatcagacgcgcttagcgccgatcagggtgattgtcacgatcagcgacatccatctgcgcgatgcactatatagcgataccgataacaacgggctggcactctgggtgcagaaccaaatgattgccagatatggcgatgttaagccgctggctgcggacccacaccaggaggtatttacctcgcccgctggcaaaacagcacgacgccagcgcgctcgcccgcggaatttattccgttggccgaacgtaccggcttaattattcccctaacccgcagcctgatggcgcaggtcaacgcgcagatgagaccactctttagtaaactaccggatgggtttcatattggcctgaatatcagcgtgtcacatattaacgcgccgacgtttatcgatgactgcctgcactatcagcgcggctttgagggtaaagcggtgaagctgatgctggagatcacggagcaggagccgctgttgctcaacggggcggttgtggacaagctcaatacgttacactcccgcgggttttccatcgcgctggacgactttggcaccggctattccgggctttcctgtctccacgagctgattttcgactatatcaaaatcgatcagagttttgtcggccgggtaaccggggaggcgccggcaagcaagctgctggactgcgtgatagagatggcgcggacgctgtcactgcgcatcattgccgagggcgtcgaaaccgaggcccaacgggattatcttaatcgccagaatattcatctgctgcagggctactatttctggaagccgatgccctacgtcgcgctggtcatgctcctgctgagcaaaccgaaggcgcggattgtcgaagaataagcgggcgttgtgaaaagtcctgccatgcgacgggctatgtatccgtcagcgctgtgggaatgaaaacgtcgtcggtcgctgtccgggtcatgcacgaccgaccggacaaagcaagaaggggttacctttcggtaaccccttcttttatatggcggaagcgcagagattcgaactctggaaccctttcgggtcgccggttttcaagaccggtgccttcaaccgctcggccacacttccggtgtgaggcgcactataaacacctcggcggatgctgtaaagcatcattttgatcaactgccttaaaaacaaacaattttgtgttattcgtctgaatttcaggcagtttgcacagaaaatcaacgcccatcgccgctggcggatgggtgttttttaatgtacatgtctttggtgtagtaataccccagcttatccggcgtgaagccccctacccaaggtttcaccagatgggtacgtacatagtgatagaccggaatggcgggaacatcctgcgccagcagatcttccgcctgctgatagtatttgccccgggtcgccacgtcggaggctttcgccgcattgcgcagggcctcatcgtaagcagggttgctgtactgactggtgttctcgctatccccggtacggaaagtattgaggaaggtggcggcatcgtcgtagtcggcaatccacgcgtagcggacggcgtcgaagttatgcgtatgcatggtatccagcatcgtcttccactcctggttctgtagcttcgcctcgacgccgaggtttttcttccacatagagctggcggcaatggcgatacgctggtgcgactcagaggtgttatagagcagggtaaagaccagcggatggctttcatcataccccgcctgcgccagcagttttttcgcctcggcaatccgtttctcacgcggccagctggcgtagtccgggttatgcagcgtcacgccgccgatatccggctgaccgatcagccaggccgggcgctggccctggccaagcacttttccggcaatgatatctttatcaagcgccatattcagcgcgcgacgcacacgggcgtcgttaaacggcggccgggtagtattgaattcgtagtaataggtcgccagctgcggcgaaacgtccagctggtcgcccatggttttctgcaactgcgcaaactgattgatcggcaccgtatagacaatatcaatctcccctgctttgtagcggttgacatcggcggcctccgaagagattggcaggtaagtcactttattaataacggtatgcgcattatcccagtactttgcattacgttcagccaccagccgctcattcaccacccattgggacagcttatacgggccgctggtgacgatatgctctggtcgggtccatttatcggcataccgctccaccagcactttgtcgatcggtaccagcgaagggtgcgccagcatcgccaggaaggcggcattcggctgggtcagagtgacctgcagcgtggtgtcgttcagcgctttcacccccaacgtctcgggtcccttttgcccgagggcaatctcgcgggcgttggcgatatgcatattgccagggtagctcgcgtagggggaggctgttgccggcgagaccagccgttgccagctccagacgatatcctgcgctgtaatggcagtgccgtcggaccaggtcagaccggggcgtaaatgaaaggtccataacaggttgtctttgttttcccagcgttccgccagtcgcggctggatcgcccccgctggcgacacgttaaccagcccttcaaagagatcgctaatgatattgaattcaacatcgctctcgactttatgcggatcgagtgacgccggttcactgccgttatttctgaccagctcctgcttttccgccagctgggtgcccggcggcacctgcgccgccagcgccccgccgctcatagccagcatactgacagccaggagtgttcgggtgatgtgattttttttgtgtaatgtcatttccctttgcctttgacgtacggggtaatccccctcttccacacttagtcgcagaactgccataaggcaatatttttcagtgacctataagatttcgatcggctcagcgacgcgaaaagcgaaaatatatcgcttttccctatctatatagaattttatgccaggcaaaagcggtaaaaactaagtaaagatgggtaaaagcattagggcttcacgcttgtttttcttattctttatccctaattacatctgtcataagagagtgactcatggatcgcataattacatcatcgcgtgaccgttcctcgctgctcagcacgcacaaggttctgcgtaacacctacttcctgctcagcctgacgctggcgttttccgctatcaccgccaccgccagcacagtgctgatgctcccttcgccgggtctcattttgaccctcgtggggatgtacggtctgatgttcctgacctacaaaacggcgaataaacccaccgggattatttccgccttcgccttcaccgggttcctcggctatatccttgggccgatgctgaacgcgtatctttctgccggcatgggcgatttaatcagcctggcgctgggcggcacggcgctggtcttcttctgctgctcggcctatgtgctgacgacgcgtaaagacatgtcattccttggcgggatgctgatggccggcgtggtggtcgtcctgattggtatggtcgctaacctgttcctgcagctgccggcgctgcacctggcgattagtgcggtgttcatcctgatctcttcgggtgccatcctgttcgagaccagcaacattatccgcggcggtgaaaccaactatatccgcgcgacggtcagtctgtatgtctcgctgtacaacatctttgtcagcctgctgagcatcctgggcttcgccagccgggactaaccgctcccctgcttaacagaggcctcgcttatgcggggcctttttttttgctacactgcggccagtttcaggcggtatgtgaaaaatcatgtttatttttgaaggcaacgaaattgaaacggatagcgaaggctatctgaaagataccacccagtggagcgaggcgatggcggaagtcattgccgcgcaggaagggataacgctcgccgttgaacactgggaagtagtgcgctttgtgcgcgagttttaccttgaatttaacacctctccggcgatccgtatgctggtcaaggcgatggccaacaagtttggcgaagagaaaggcaacagccgctatctctatcgcctgttcccgaaaggacccgccaaacaggcgactaaaatcgccggcttgccgaagccggtgaagtgcatctaatagaggatcgcgaatttgtcccagctgcgggtgggttgatggggttcggttaacactcggtcaacccgcgcgctgcgcggccccccggctttaagccaggcgatgagtttttccacctgctccgcctcgccgcaggcaagcacttccaccccgccgtcatccagattacgggcataaccggtcacccccagctgcagcgcttcccgctgcgtggaatagcgaaatcccacgccctgaaccgaaccgtaaacccatgccattgtgcagatactggccataatcatctccttttcgctcacgctatacgctgaggatagcaaattcgctcagcgtacatgcttcggcagtaaaccataatgctgacggaagcgcgcggtaaagcgcgatcccgactgatatccgctgttctgcgcaatttcgcctattggccgcgaggtcgtctgcagctgccccagggcgtgggccatccgcacctcctcgacgatctggcgaaaactctgcgattcctgctgcagccgacggcgcagcgtggactcgccgagaaagagcattttcgccacccgcgacacgctccatgcctgcgccggcgacagcataatcagctgccgcacctgcgccgacagatcctgctgccgctcgacgagcagcgggcccgcatagccagcctcatgcagggccagcagcagccccatggtctggtgctgctgcagcgcgacggacaatccctcccgcaccgcctgcagaacgctttgccacataaacgccagctctgtcgtcaccggtgcgcagagcgaggtcaggcgccctggcggtggttcgctgagataacgagtcttaaacctcgtcagcagctcgggcgtcagcgatagcagatcggagcaaaagaggccattctccggctggttaatcacctccagttccacgtcagctggcaaaacaatcagctgttgcggagtcgccagcacccggctctccccttgcacaatcactttgctgccgcgtttcacccgacagagcgccggggagaacagccgcacgcgatgcagtctgcatagccgtcgggtggtgatctccgccgcggttaaggcgttatgctgaaagcggatactctccatcagaccgaccttttattttaacgcccggccatcgccgtcaactgtgcgctggcgagagcatggctatgtaacagatagccgaccagcgccccgctggccccggcatccaccggcagcgtggggacatccagcgcccataccgtaaagcgatagcggtgcggtttatctcccgccggcggacaggcgccgccgaagccggcatagccaaaatcgttgcggccctggaccgctccgcccggcagtgtagcgctgtttttatctcccgcgccagcgggcagcgaaaagacgctgctggcgatattgaccaccgtccagtgccaccagccgctgccggtaggcgcatcgggatcccggacggtgaccgcgaagctgcgagtgcccgccggggcgtttttccatgtcagctgcggagagacattgcctccggtacagccgaaaccggcaaaccagtgctgctgggccagcggctgcccgtcacgcatatcattgctgcttacgctaaacggcgcggccatcgcgccgctgctcacagccgctaccatcgccacagccatgcggatacctgttttcatcgtctgctcctcgttggggtgagaaaacagggtatgagagtccgcaccagctgaatgtgccgaagcgcctgcattttgtgccgaaacgctcacctgtgcctgccgggcgaaagatgcttgcgtgcgccaggtgtgctaatctacgcgccatttttcggtgccgacattcccgttgcttaaaggtagccccatgacagattccctattcccccgcttagtgttagccaaaggacgcgagaaatccctgctgcgtcgccatccgtggatattctccggcggcgtcgcccgcatggaaggtaaagcccgcagcggtgaaaccatcgatatcgttgaccatcagggaaaatggctggcccgcggcgcttactcgccgtcgtcgcagatccgcgcccgcgtgtggaccttcgaccgcaatgaagccatcgatagcgccttctttgaacgccgtctgcagcaggcgcaaacctggcgtgcctggctggccgagcgcgatggcctcgacagctaccgcctgatcgccggcgagtccgatggcctgccgggcgtcactatcgaccgctttggcaactttttcgtgctgcagctgctcagcgcaggcgccgaataccagcgcgccgccatcatcagcgccctgcagaacctgttcccggactgcgccatttacgatcgcagcgatgtcgccgtgcgtaaaaaagagggactggagctggcccaggggccggtggtgggcgaactgcccccggcgctgctgccgatcaccgagcacggcatgaagctgttggtcgatatccagggcgggcacaagaccggctactacctcgaccagcgcgacagccgcctggccacccgccgctatgtcgcggataaacgggtgctgaactgcttctcctacaccggcggctttgcggtgtcggcgctgatgggcggctgccgccaggtcaccagcgtggatacctctcaggaggcgctcgacgttgcccgccagaacgtggagatcaacggactggatctgtccaaagcggagtttgtgcgcgacgacgtgttcaaactgctgcgtaaataccgcgatcagggagagaaattcgacgtgatcgtgatggatccgccgaagttcgtggaaaataaaagccagctgatgggcgcctgccgcggctataaagatatcaatatgctggcgatccagctgctgaaccccggcggcgtgctgctgacattctcctgctccgggctgatgaccaccgatttatttcagaaaatcatcgccgatgccgcaattgatgccgggcgtgatgtacaatttatagaacagttccgtcaggctgccgaccacccggtgatcgcaacctacccggaagggctgtatctgaaggggtttgcctgtcgcgtcatgtaacttgaaaaacgaaacatgagcctcatatagggagtattcatgtttcccaggaggtgcctatgatagccagcaaattcggtatcggccaacaggtccgccatacgctcttgggctacctgggcgtcatcgtcgatgtcgatcccgagtattcgctcgcggagccggaagaggatgaaattgccgccaatgacgaattgcgcgcggcgccctggtaccatgtggtgatggaagatgatgatggccagccgattcacacctatctggcagaagcgcagctgagcagcgaaacccgcgacgaacacccggaacagccgtcccttgacgaactggccaaaacgattcgtcagcagctgcaggctccgcgccttcgcaactaaaataaaaccccgctaacgcggggttttattttatttcgccaaccctagtcgcggtagttcaatggccgggcagcgatccatcactacgctcaatccggcttccctggccagcaccgcagcctgctcattgatcacccccagctgcagccatagcgttttcgcgccgatggctatcgcctcctgcgctacgccccacgccgcttctgaattacggaagacatcaaccatgtcgaccttttccggaacgtcggcgagcgtcgcatacccctgttgtcccagcagcgtcttgcccgccaccttcggcgaaaccgggataacgtgatacccctgatccagcagatacttcatgacccggtagctcggacggtcaggcttgtcgctggctccgaccagcgcaatcgtccgtgtcgaggtcaggatgccagcaatatcattctctttcatggtttcctcctgctatttcacttaagtgtatgctaatccgcagcagggggccatccagcctaacccacagattcagcaaaattttcatccccgatgcttgcagcgacagccacattcagtaatctgtttgcaggtcaaaatgtggaatgaaaatatggaactgacaacacgtaccctgcctgcgcaaaaacatatcgcgctggtggctcacgatcactgcaaagatatgctgatgaaatgggttgctcgccatcaggcgcagctggcgcaacatattttgtatgctaccggcactaccggtaatctcgtctcccgggctaccggcctggaggttaatgccatgctgagcggtccgatgggcggcgaccagcaggtgggtgccctcatttcagaaggcaaaatcgacgtgctgatcttcttctgggatccgctgaacgccgttccccacgacccggatgtcaaagcgttgctgcgcctggccaccgtctggaacattccggtcgccactaacgtctccaccgctgactttattatccagtcgccgcacttcggtcaaccgctagatattctgatcccggattatccacgctatcttgccgagcgcctgaaataatcgagccgcgattacggcttcctggccacgggcacatccagcgcctgcaggatctcgacaaacggcgaaggttgcgccttgttaaataacagccatacccggtgacgagcgcgggtgagcgccacgtacaacagtctacgctcctccgcatccggaaaatcttccggctgcggcaggagcgcctgctccataatcgactcgcgcgccggggccggaaacgcatcctccccatcctgtagtcccaacacaatgacaaagtcagcctgctgacctttgctggcatgaatcgtcataaaatcaagctgcaggtgcggccagcgcgtcgccgctttgttgagcgcctcaggcttcagatggtgataacgggcaagcagcaggatgcgctgctcgggcttaacgtaaccgctcagcttatccagaagatcgtccagcttgtcgtcggctaacagcgtgacggcctttttatcacctgccataaggctgttcagcggtttgcttaactgatgcggattttgctggataaagccattggctatttcgccgatacgcccgttaaagcgataggtggtatccagcgcacagcaatccccttcgccaaagtagtggttgaatgcggtggtcagagaaagctgcgccccgctgaaccgatagatcgcctgccagtcatccccgacggcaaagagcgtggtttggctattctgccggcgtaacgcggccaacagcgaggctcgctgcggcgaaatatcttgaaattcatccaccagaatgtgtttccatgggctgacgaagcggcctttatcgagaatattgaccgcctgatggatcaggccggaaaaatcgaccgcattctcggccttgagcgccgctttccagtctttcatcagaggcgacatcagcttcacccgtttactgaacaggtcgcgtaccgcttccggcgccccggcaatcatctccgcctgggagccgccgtgcatgcgcatcaggctcacccagcggtcaagccggctggccatccgccgctgcacctttttgtcctgccagaagtccccctccggcagttgccagcccatctcttcttccagccacaggcgccaacctttcgcctgcgcttttttctcctggcactgcttttgccagcttttcagcagcaatgcgtggcgggccgcagtatcgctttccagcttactgatagtgggcacttttttgctgccctgctgaataatatgcaacgccagcgaatggaaagtacgcgcggtaatatcatctgatgccagacgctcgcggatccgctcatccatttcctgcgccgcctggcggccgaatgccagcagcaaaatttgatctgccgcggcttctccccgcgccagcagccagcccgctcgcgccaccagtaccgaggttttaccgctgcccgctcccgccagcaccagcagggagcgctcgccgttcactaccgcacgcgcttgtgacgcattgagcggggacgactcaacgctatcaaaaaattcgcgatattgctccagcatcgcctcggtaaaggcctggttatgggccagacgcgtcgcttcaatatcgcctaaccagcgctgacactcccgccacagctcccggcagttatcaaaggcatcaagccgactggtgggcatcggcaaaccagtcaacgcatggcgtatattatcctgaacatccgccacctgctgacgggttagccacttgccttctgcgcgagtgtgctcgatcgtcgccagctgctgcttcagcacgccggcggcgatattgctcatctccgtgctccactgctgccagagcgtatgtaaatgatgataaaagcgctgcgtttcactccactcggtaccgtgcaaacgcacgactttcccgtccggtagcacaaactccagttcgccccagaccagaccgcgcttacaatgcactgacaataactgattgaaagggataagatactcatgacgatcgccggaaacttttaccccggcgttcagtagctgcacccgatcataagggtgctgagccatgcgtttgcccaatgttgtcgctttaagttccatgtaatgtcgattttcaatcagggtggattgtttttcagtttaaccgccccggaccaggtgctccagcgcaaaaaaacgttacaatcatcaggtcttattatccaccgggcaaaaccgaggctttatgcgtaccattctgaatattttgaactttatccttggcggtttcgccaccactctaggctggctactcgccaccctggtcagcatcattctgattgtcacgctgccgctgactcgttcctgctgggaaatcactcgcctttcgttatttccctacggtaacgaggcgattcatgttgacgagctcgagccggggcgcaaaaacggtctactgaacgccggcggtaccgttctgaacattctgtggttcatttttttcggctggtggctctgcctgatgcacattttcagcggtatagctcagtgcctgactatcataggcatcccggtggggatcgcgaatttcaaaatcgccgccatcgccctctggccggtgggtcgccgggtcgtttctgtggaaaccgcgcgtgctgcgcgtgaagccaatgcgcgtcgtcgctttcagtaaccgaacggaacacggacatgattagccccctgctacgccgctacacctggaacagcgcctggctttataacgtacgaatttttatcgcgctctgcggcacaacgctgtttccctggtggatcggcgaagtcaaactgaccatccccctcaccctcggcgtcgtggctgcggctctgaccgaccttgacgaccgtctggccggccgtctgcgtaatcttgccattactctggtttgcttttttatcgcctccgcctccgtggagctgctgtttccgtggccgccgctgtttgcccttggtttgaccgtgtctaccatcggctttattttgcttggcggcctcggtcagcgctatgcgaccattgccttcggcgccctgcttatcgccatctacaccatgctcggcgtcacgctgtacgatcattggtatctgcagccgttgttcctgctggcgggggcagtgtggtacaacctgctgacgctgtccgggcacctgatctttccgattcgtccattgcaggacaacctggcgcgtagctatgagcagctggcccgctatcttgagctcaaatcccggctgtttgatcctgaccttgaggatgagagccaggcgccgctgtacgatctggcgctcgctaatggccagctggtagctacgcttaaccaaaccaaggtctcgctgctaacccgactgcgaggcgatcggggccagcgcggaacccgccgcaccctgcagtactactttgtggcccaggatattcatgaacgcgccagctcatcgcatattcagtatcaaaccctacgcgatcaatttcgctatagcgatgtgatgttccgtttccagcgtatgctttcgatgcaggcgcaggcctgccagaaactgtcgcgggcgattctgttacgcgaaccctatcagcatgatgcccattttgaacgggcgttcatgcatctcgatgcggcacttgagcgcgtgcgcgccggcggcgcatccgacgagcagctcaacgccctcgggtatttactgaataacctgcgcgctatcgatgctcagctggccaccattgaatcggtgcaaaccaccgcgcctgccgggagtaataccgagacgctgctggccgacgacagactcggcggtctgagcgatatctggctgcgcctgcagcgcaatatgtcgccagagtcggcccttttccgccacgcagtacgtatgtcgttggtgctctgcgccggctatgcctttatccagtttaccgggctccagcatggctactggatcctgctaaccagcctgttcgtctgtcagccgaactataacgccacccgccatcgcctggcgctaaggattatcggcacgctggttggggtggcgatcggcctgccggtcctgctgctggttccctctgttgaagggcaactgctgttgatcgtcctgaccggcgtgctgttttttgccttccgtaacgtgcagtacgcccatgccacgatgtttattacgctgctggtgctgctgtgctttaacctgcttggcgagggctttgaagtcgcgctgccgcgtatcattgatacgctgatcggctgcgccatcgcctgggcagcggtcagcttcatctggccggactggaaattccgcaacctgccgcgggtgctggaccgggcaatgaacgcgaactgccgctatctggacgcgattctggagcagtatcatcagggccgcgacaaccggctggcctaccgtgtcgcgcgtcgtgacgcctacaaccgtgatgctgagctggcctccgtcgtctcgaacttatcgactgaaccacgcgcggatgccacccagcgagaaaccgcctttcgtctgctatgccttaaccacacgttcaccagctacatctccgctcttggcgcgcatcgggaaaaactgtccacgccggaaatcctcgccctgctggatgatgcagtctgttatgtggatgacgccttgcaccatacccccgcggatgaacagcgggtgcaacaggctttgaacagcctgcaaagccggatccatcatctggaaccgcgcgcggacagtaaggaacccttggtcttacagcagattggcctgctgctggcgctgctgcctgaaatctgccgcctgcagcaacgggtccacgcccaaaccgaataacaaggcttttccgctaccgggtagccgcccattcgagaagctcctgacgccgtggcgtcgggagcgcggcggcatgtaccccggcaatcgccccctccagcgccagcaatacgctcagcgataaagaagcattatttacgcgtagcctcagccatgcctcctgcgcaccaacttcccgcaacgtcctaacgtccggtatgcccgcgtgaatcagctgcaattccatatgaaagctgatattgggtaaatccttcaggcggcccgacgcccgtcggcagttcttttcgcgctgcgcactctgccacgacagtagcgatagccgaaaaagctgctgctcatcgcgccataaagtgtcgtcaatttgataatacttcagcggcactatgcggccgtgtcggcgcagcgttaacagaggattacgatgttccacccgataagcagcgctctgctcgcaggccttcagataaatgttcccctcggccaccatcgcaaataccgtatcatcaatagccaggctgtagccgccaaagagcggacgagtatgcagttgacccagcggtgagacgcaggcctgaaattgcgggagccgcggacaaactagttttctcatgatcattcctttgttaatcatgtaattaaacttaagttgttaacggatccgctaagagaaaacataagggacttcccgggcagcagcaagatgattttcgccgactttttcaccagaatgcggttttgcgagacgctttcagaaaatcgcaagcgttgcagcaatcgacagggagaaatgaaaccattagcgcgcgttaaggattggataatgcaggggcttcttttgacagataaggaaccacgagaagcgattaaattcccggcagcaaaatggcaaattgcggttgatcttttcccctggcgaagatactgtatatgcatacagtaactaaaggcgggatagactatgtttacttcagctcacgcaaaccgttcagcacaggcttctgctccggcaggccactacgctcatcgttctggcgaacagaacaccaatgggctgatcagtgaaattgtctatcgtgaagatcaacccatgatgacgcagttattgctgctacctttattacagcagctgggtcaacagtcgcgctggcagctgtggctcacgccgcaacaaaagctcagccgcgaatgggttcagtccgccggtctgccgctgtccaaggtcatgcaaattagccagctctctccctgccataccatagactcaatgatccgtgccctgcgcacgggtaattatagtgtggttatctgctggctggcggaggagttaaccgctgacgaacatgaacgtctcgttaacgctgcccaggtagggtccgcgatgggattcatcatgcgcccggtgcgaaatcagggcacgctcggcagacaactcagcgggctaaaaattcactcaaatttgtatcattgagtgaaattaggattattcctggaattttttttaccgctgggaaaggtacagcgttttttatggtctttttcgcggaatgcctgccacacggggatttctgtctttttttcgtgtacgaaaatcaaccatatttgttaaatattgtgtacacaacccttttttttcatatgcctgacagagttcacacttgtaagtttcgaactaagttgtagactttacatcgccaggggtgatcggcttacgctgcatgtatcagcatagttaacaacaagtcacgcccccggtgaaggatttaaccgtgaggtcttttgtaacttcatggcgaattttggatgataatgaggcgcaaaaaatgaaaaagacagctatcgcgattgcagtggcactggctggcttcgctaccgtagcgcaggccgctccgaaagataacacctggtatgcaggtggtaaactgggttggtcccagtatcacgacaccggtttctacggtaacggtttccagaacaacaacggtccgacccgtaacgatcagcttggtgctggtgcgttcggtggttaccaggttaacccgtacctcggtttcgaaatgggttatgactggctgggccgtatggcatataaaggcagcgttgacaacggtgctttcaaagctcagggcgttcagctgaccgctaaactgggttacccgatcactgacgatctggacatctacacccgtctgggcggcatggtttggcgcgctgactccaaaggcaactacgcttctaccggcgtttcccgtagcgaacacgacactggcgtttccccagtatttgctggcggcgtagagtgggctgttactcgtgacatcgctacccgtctggaataccagtgggttaacaacatcggcgacgcgggcactgtgggtacccgtcctgataacggcatgctgagcctgggcgtttcctaccgcttcggtcaggaagatgctgcaccggttgttgctccggctccggctccggctccggaagtggctaccaagcacttcaccctgaagtctgacgttctgttcaacttcaacaaagctaccctgaaaccggaaggtcagcaggctctggatcagctgtacactcagctgagcaacatggatccgaaagacggttccgctgttgttctgggctacaccgaccgcatcggttccgaagcttacaaccagcagctgtctgagaaacgtgctcagtccgttgttgactacctggttgctaaaggcatcccggctggcaaaatctccgctcgcggcatgggtgaatccaacccggttactggcaacacctgtgacaacgtgaaagctcgcgctgccctgatcgattgcctggctccggatcgtcgtgtagagatcgaagttaaaggctacaaagaagttgtaactcagccggcggcttaagttataaccgataaaaaaacccgcttcggcgggttttttttatgccctctcgcccacttcagcggctgagagctgtgaagcagcccccggccagggcaaccaccagcaggcgggtcgacgatcctacctggctattctttccctaacagtacctgcagatcgtgcttcaggctcgacattttgctggcatatttctctttgtgctcggcatcttcaatcagctggacgatggtttcagacaaggttttgccccgccgctgcgccaggccagcaagacgctgccaaacgacaaactcaaggtcgatagacttcttacgcgtatgctgatgctcagcgttaaaatggcgtttccgtcgcgcgcggatagtctgcttcatgcggttcatcagcgccggattcatatgctgctcaatccaggcatgcaccagcacaggttcattctcgagcgtcagcaagtcatctaccgcagcttgcgcagcgctggcctcaatgtagcgggtaatcagctcaccttcccggtgcttctttaccagatatttccatttccagccgctttcaagattttccagttgttgatatttcattgcgatctcaatgtgaccgtgtaactcatttcaggatatcagtttttttctgatgtgctgaatataaatcattattcgtgaagtctgcgaccgggtaatcatcagggtaaccataatcctccgtgtgctcggtcgcggcatcaggtataattgcgcgctttacatctaactaaaaaacagcgactttgaccattacgaaactgacccgaaccgaccttgcgcctgatctggaagcttaccaggcgctgtttgctcaagctgaactttcccatccggccccctccctctcgggcgatctgcagccgcgtttgttctatgggcttgagcagctgctgtacacgccggcagtctcctccttcatgctagtgaaagcccctgaagagccggaatatctgcaatggctggcggctgaaacccggactctgcacgagcctgccgcaccgctttacggcgtccgctatgaggtaaccgacgctcaggtgacgctcgcaccggcgcagggcgctgaggataatttcgccagcactgccccggtcgtgatggccgattgggtagaagcggaacagctgtttggctgcgtacgccagtttaacggtgcaatcaccctccagcctgggctggtccatcaggccaacggcggcgtgcttgtgctttcgctacgtacactgctggcgcaaccgctgctgtgggtgcgtctgaaaaatatggtgactcgtcagcgctttgactggctttctatggatgaatcgcgtccgctgccggtcagcattccctccatgccgctgagtctgaaaatcatcctggtgggcgaacgcgaatcgctggccgatttccaggaaatggagccggagctggctgcgcaggcgatctatagcgagtatgaagacactctgcagtttgctgacgccgacacgctaaaggcctggtgccagtgggtatggcagaatgcgcagcagctggcgctgccgggcccggcagccgatgcctggcctctgctgatcgatgaaggaacgcgctataccggcgatcaggagaccctgccgctcagtccgctatggataacccgccagctgcgggaggccgccgccttctgcgaaggcgaggagattaccggcgaagcgatgcagaccatgctggcgcgccgggtatggcgtgaaggctacctggcggagcgtatgcaggatgaaatcctgcaggaacagatcctgattgaaaccgaaggcgaatgcgtcgggcagatcaacgccctgtcggtgatcgaattccccggtcatccacgcgcgttcggtgaaccttcacgcatcagctgcgtcgtgcacattggcgatggcgaatttatcgacgtcgaacgtaaagccgagctgggcggtaacattcatgcgaaaggcatgatgatcatgcaggcttttctgatgtccgagctggagctggagcagcagcttcccttcactgcttcgctgacctttgagcagtcctacagtgaagtggatggcgacagtgcctccatggcggaactctgcgccttaatcagcgccctggccaatgtaccgataaatcagagcatcgcgatcaccggctccgtcgaccagtttggtcgcgtgcagccggtcggcggcctgaacgagaaaattgaaggcttcttcactatctgtcagcagcgcggtttaaccggcaaacagggagtgattatccctgccgccaacgttcgtcatctcagcctgagccacgagctacgtcaggccgttgccgacaaccagtttgctatctgggccattgacgatattaccgaagcgctgccgatgttgacacagatgatgtgggacggtgaaggacagacgctgcgacaaaccattcaggagcggatagcgcaggcgacccagcaagagactcgccatcgttttccgtggccgctacgctggttaggtgggacaagttctaactgatcggacttgttcagcttacacgtgttagctatcctgcgtcccgaacttaaaataaggcttactgaaaacatggtagataaacgcgaatcctatacaaaagaagatcttcttgcctctggtcgtggtgaactgttcggcgcgaaaggcccgcagttaccggcaccaaacatgctgatgatggaccgcgtcatcaaaatgaccgaaaccggtggtaactacgataaaggttatgttgaggcagaactcgacatcaatcctgacctgtggttcttcggttgccactttatcggcgatccggtgatgccgggctgcctgggcctggatgctatgtggcagctggtcgggttctatcttggctggctgggcggcgaaggcaaaggccgcgcgctgggcgttggcgaagtgaaattcaccggtcaggttctgccgaccgcgaaaaaagtcacctaccgcatccacttcaagcgcattgttaaccgtcgtctgattatgggacttgcggatggtgaagtgctggttgacgatcgtctgatctacaccgcgaacgatctgaaagtgggtctgttccaggatacttccgctttctgataacattcagtagcgattaaaaggcgaagcccccgctatgcggaggcttcttttttaaagagacagtgtcaggccgttagtaccctgtcctccatggcttctcgccagcctcccagccaccatgagcgttgattcaggctctggtatggacacatttctttcgatcttcccgcgatacccgcctgatatccgcgttggtgtgcccgttccaggcgatctcgtttttgtctcttcatgcctcgtttccctcattctttgatctggtggaaaagaaaacagtggtcgcaaattgtgcagccacgggttacgaataccgcgaaaagaaggcaacgtcaatgcgcaaaattcacgccagtgtcatatttgtgacctatataagagttcattttttgttcgctcggcgcagccgccggtaacgaactgacctggcaaaaaaaatgccgcgcggcccaggtgaaccgcgcggcagatcattatgatgaattttacttatggcagacgattaagctcgctggcaatggcagccgcctcctggctccacgcctgcgccagggtcttgaccatcgcgtcataaccatcctgttcctgcctgaggacgatgttaaacgggcgcttaatcagctgtccctgatgcttcagcagccactcaccgctaacgataacccgcccgtcatagcgaccatgaaagccattgaccgcaacgttgagggtatcctgctcgctccccagcggctgggacgacactacccagccgggcaactgctggctgagatttgccaccagcgtagtgcgcagctgctgatccagcggactggcccacagattattattggcgatcacatactgcacgtcggtggtctgatagaccaccccgttacccgccagataatccgggatgctgacctgctctacccacagcagacgtgccccctgactggcggcgctctgcgcgccgccctgcacaaccggtagctgatagtatgtcttgctttccccgccgctactgcacgccgtcagtacgcatacggctgccgccagtaaccattttttcattgtttcgctcccttcggctgtggatcttttttatccttcgcctcaaataccagcgcattgctcttatcatttagcgttttcagaaccggctgcagctcacgcagcacctgatccagacgctgcatatcggccaccatcttattgtaggccgcagagccaggctggaagccctgcatgctacggttcagctcacgcagcgtcgtctgcatatcggcgggcagctgctgcattgactggctggaggtgatcttattcagattatccagcgtggtctgcacgtgctgcatcgtcttctcgctctgcgccagagtactggtcgcctgctccagcagcggattaatcggcaggttattaatcttatccagcgcatccatcagacgctgctggatctgtgccagtccaccgctgatggtcgggataatcggatagccgttaaactcctgtattttcccgcgcgggggagccttcggatagaagtcgagatcgatatacagcgcgccggtcaccaggttaccggttttcagcgagccgcgcagtccgcggttgatcagatcgtcaatgtgggcgcgaatattcggatcgccgccaagctgattaatcagccgttgcggttcaacccgcacttccactggaatacgatagtcatcgttcaaacgctgcttcagccccggaataaagaacggcactttgccgacggtgcccagacggataccgcggaactccactggcgcgcccggctgcaggccgcgaaccgagtctttgaagaacatgacgtaatcgatatgctcggtaaagactgaatcctggatgctcttctgatcgtcaaacagatggtattccgttttattcgccaccggctcgccgaggtccagtccttcaggaatatcgaagctcaccccgccgccaaacagcgtcgacagcgagcccatctcgacgcgcatccccgccgaggtcaaatctacagcgatcccgctgtctttccagaaacgaacgttggtggtcaccaggcgatcgttcggcgcattgatgaacagctggtaagttatacgacgtttctgcgtgtcgaaggtgctggtttccactgaccccacgcgatagccgcggaacaacaccggatcgcccggcgacagctggcccgccttgctgctttccagcagaatacggatccccttggcatccggcgaggccagcggcggagaatccagtagcggatactgcgctggcaccgaaccttttgttcccggctgcagttcaatataggccccggacaacaatgtcccaagaccgctgatcccctcgcggccaacctgcggttttaccacccagaagacggaatcgttgtgcagcagcttctgcatcccggaattgaggcgggctttgatttccacgtgggtgagatcgtcggtcagcgtcgcgctctccaccaccccaacgtctacgctgcggctcttgatccgggtttttcccccttcaatcccttccgcattggtggtgatcagcgtgacctcaggcccctgatggctgtaatgataaaacaggatccatgccccgatcagcgcagtgacgatagggaagatccacaccggtgaccagttcttcaccttctgcactttcgcttctccgctcttattttccatgttgttgtatttcctcatggcttgaatctggctcacgatcccacagtaaacggggatcaaatgtcatggctgaaaacatggtcatcaccaccaccagcgcaaacatgaccgcgccgatggctggatagatattcattaaccctcccatgcggaccagcgcagagagcacggcgatgacaaaaacgtcaatcattgaccagcggccaacaaattccaccacctcatagatcagatgcatgcgctccgaatctcgcgcgccgttgccgttggcgttccagcataaccaggcgatagcgatcatcttcagcgtcggcaccataatactggcgataaagatcaccagcgccaccggataagaaccttcgctccacagtaaaatcaccccggccataatggtcgatggcattttatcgcccagcagatcggtgatcatgatcggcataatgttggcagggagataaaggataaatgacgtcaccagcagcgccagcgtccactgcaggctatttttgcgccgcgccgttcctttactgttacagcgcgggcagacggtctgatcgaccggcaacaccgccgtacagcaggcacaggagcgcagcccctgacggataccggtcaccccgaccttcagcggctgggtaatggccggcatgggggcaatatcatcccatagccagcggcggtcgacgcactgaaaagtacgtaactgcagcaggcaaaacatacaccagggaacaaagctcagaccgatgccgatatcaccgtaggccatcagcttgacgaagctcaccagtacgccggcaagaaagatctccgccatgccccaggttttcagttgaaagagaattcgcgcaaggaacgtcttcaggccggcaggcattctgacccgattaaccagcagcaaaatggtgaccaggcaaaacgccggcactaattgaacaaagagtaaaaagaaagtcccgagactggcgtaatcctcggtaaacagtacgttgggaatttccagcagctctatttcgctactgatgccgcccactttcatatagataaaagggaacaggttggccagcagcagcataaacagcgcgaccagcgcatacgccgtgggacgctggcgaggcgcgtcccacgtggtggttaacgttgtaccgcagcgcgggcaggcggctttctggcgatgctcaagctgcggcaaagccaccagcaaatcacattggggacatagaatatgtcgcgcagcatgatgatgatcgcacatgacaactcctcggctcaggcgccgttctttaatccttcgagatattcccagcgttcaaaggccgcttccagcgcctgctccgcttcggccagctgcgccagcacctgctgcgtgcgatcgtgcggttgcccgaagaaatcgggatcggcaacctgatcctgcagcgtctgcagttcggcctcgagagcctccagcttctgcggcagttgttccagctcgcgctgcaggttatagcttagtttgttcccgccgcgtttgacagtttctgcttttggctgagcgacttccgtcgtttttttaacgaccgtctgcttttgcgccaaagactgggcctgctgaccgcgggcgtcgtgatagccgccgacgtactggccaatacgaccgccgccttcgaagatccagcactcggtcacggtattgtcgacaaactgacgatcgtggctcaccagcatcacggtcccctgatagccatcgatcagctcttccagcagctccagcgtttcaacatcgaggtcgttagtcggttcatcaaggatcagcagattgctgggtttcaggaacagccgggccaacagcaggcggttacgttcccctccggaaagcgcacgtaccggggtcatcgctcgtttcggatggaacaggaagtcctgtagataacccagcacatgacgtggcttaccgttaaccattacctcctgtttgccttccgccaggttgtccatcaccgttttatccggatccaactccgcgcggtgctggtcgaagtaggcgacctccagcttggtgccaacatggatccgcccgctgtcggcctgcagctggccgagcatcagcttcagcaacgtggttttcccgcagccgttggggccgatcagggcgatcttgtcgccgcgctggatctgtgcggagaaatccttcaccagcactttgccgtcaacctgatagttgacgttttccatctcaaagacgattttgccggaacgggaagcctcctcaacctgcatcttcgcgctgcccatcacttcccgacgctcaccgcgctcgcggcgcatcgccttcagcgcgcggactcggccttcgttacgggtccggcgcgctttgataccctgacggatccacacctcttcctgggccagcttgcggtcaaattccgcattctgcagttcttcgacccgcagggcttcttctttatcgaggagatactgatcgtaatttcccggataggtcaccagcttgccacgatcgaggtcgacaatgcgcgtcgccatattgcggataaaggaacggtcatgcgaaataaagataatcgtgcctttaaaggttttcaggaaaccttccagccagtcgatggtttcgatatcgaggtggttagtgggctcatccagcagcagcacgcgcggcccactgaccagggcgcggcccagcgccgctttacgtagccagccaccggacagcgacgccagctgcgcattggcgtcaaggcccagctgctcaatcacttcgttaatgcggctgtccagctgccatagtcccaggttatcgagctgctcctgcaggcgcgccagttcatttaaatttttgtcgctcggatcggtcatcacctgatgcgacacgtcatggtaggctttcagataagccgcctgctcggcgatcccttcggcgacaaaatcgtacaccgtaccagcaacgttccgcggcggatcctgctgcagacgcgccacgatcaggtcctgttcataaatgatgcgtccgtcatccagcccctgctcgcggttgaggatcttcatcagggtagatttaccggcgccgttgcgtccgacgaggcagacgcgttcgttatcttcaatatgcagctcggcattatccagcagcggcgcatcgctgaaggaaagccaggcgccgtgcatactaatcagtgacattatttattcctttcaggctgcggtaatcagccagcagttgtggatctgacggttgcgggcaaaatcctgcgacagcgttttttgcgaaatctcttgcgccttcaggccaagcgccgccagcccgtcatgatccatacggaaaccgcgtttgttattcgagaacataatggtgccgcctttacgcagcagacgttttagatcggtcatcaggcgaatgtgatcgcgctggacgtcaaacgcatcttccattcgtttggagttggaaaaggtcggcggatcgataaagatcagatcgaactgctcggtgctctcccgcagccaacccagcacgtccgcctgcatcaggcgatgcgcgcggccggtcaggccattgagacgcaggttgcgttccgcccactccaggtaggtgcgtgacatatccaccgtggtggtggatcgcgcaccgccgaggcctgcgtggacgctggcgctgccggtataggagaacaggttcaggaagtccttacctttactcatctggccgagcatgcgacgggcgatacggtggtcgaggaacagaccggtatccaggtagtcggtgaggttgacccacaggcgcgcgttatactcctgtacctcaataaagtcgcccttctccgccatcttctgatactggtttttccccttctgccgttcacgggttttcagcaccagcttgttaggcgccatgtccagtacggcgatagtcgcagcgatgatgtcgaacagacgctggcgcgccttatgcgcgtcgacggttttcggcggggcatactcctggaccaccacccagtcggcatagcggtcaatggccacgttgtattccggtagatcagcatcgtacaggcgatagcattcgattccttcctggcgggcccatttttcaaacttcttcaagttcttacgcagacggttagcaaaatcctccgccagcatcgccggcttgccgccttcgctctccgccaggtgataattcttctgcacgcagtccagcgggccgttcttggctttaaactgcttgtcggcacgcagctgcaggcaactcagcagctccggcgaagcgctgaataccgacaggttccagccgccgaactgacttttcattatccggccaagcaggctgtgcagagcgatcagcgctggctcgctttccagacgttcgccgtacggcgggttactgatcaccgtcccgtacgggcctttcggcagcgggttgttcagttgggcgacgtctttcacgtcaaaatcgatcagctcgccaatgccggcgcggcgggcgttgcggcgcgcgcgctcgattacgcgcgcgtcgacgtctgagccgtagaagcgtgactcatacgctgccaatccctgacgagcgcgggtttgcgcttccgccttcacctctttccagatgccgtcatcgtgctgcgcccagccgccaaagccccagtggccgcggtgcaggcccggcgcgcggtcggtcgccagcatcgccgcttcaatcagcagggtaccggagccgcacatcggatcgagcagcggcgtacccggtacccagccagagcgcatgacgatcgccgccgcgagattttctttgatcggcgccattccggtaccatcgcgatagccgcgcaggtgcaggccttcgccgctcagatccagcgagatgtgcgccgtctctttgttcagccagacgttgatccgcagatcgggcgactcacgatcgacgttcgggcgcggcagattcttacgggtgaagctgtcgacaatggcgtctttaaccttcagcgcgccgtactggctgttacggatctcgtcattgaggccgctaaaatgcaccgcgaaggtggcgccagggttgaacatctccgtccacggaatggcctgtacgccgaggtacagatccagatcgctgtatacgcgacattcgcccagcggcagcatgatgcgcgaagccagccggctccacatcaggctttgatacagcaggcgcgtatccccctgaaaatggaccccgccctggactacctggcagtccgtcgcgccaagcccttccagttcagtttttaacagctcttccagcccacgagccgtactggcaaacagagaattcatatcgtcacttttacttaaagaaaattggtgcgcattatagccaatatgtgccctatgtcataaagttataggcttatttttggaacccggaggcagcgtatggtaacgctatcgcgactttttattcatcctgttaaatccatgcgcggcataggcctgacccacgcctttgctgatatcagcggcctggccttcgatcgcctgtttatggtcaccgaaaccgacgggacctttattaccgctcgccagtttccgcaaatggtgaaatttattccggcgccgctgcatgatggccttcacctgaccgcaccggacggcagcagcgccgtggtgcgttttagcgatttcgccacgcaggccgagccgaccgaagtctggggcaaccattttaccgccctcatcgcgcccgccgccgttaaccagtggctcagcggctttttcaagcgcgatgtccagctgcgctggctggggccgcagctaacccgccgggtaaagcgccatgatgcggtgccgctctccttcgccgacggctacccttacctgctggctaacgaggcctccctgcgcgatctgcaacagcgctgcccggccagcgtaagcatagaacagtttcgccctaaccttgtggtcaccggcgcggcggcctgggatgaagatagctggaaagtgatccgcatcggcgaggtggtgtttgatgtcgctaagccgtgcagccgctgcatttttaccaccgtcagcccggagcgcggtcagaagcatcccgccggggagccgctggaaaccttaaagcgttttcgtaccgcgctggacaatggcgatgtcgattttggccagaacctgattgcccgcaacagcggggtgatccgggtgggagatgaagtggaaatccttacccgcggcccggcgaaagcctacggggcaggtgaaagcgacgataccccggctcccgaggcgcagcagcaggctacggttgccatcgaatggcagggtcaacagtttaccggcaataaccagcaggtgctgctggagcaactggaacaacagggcattcgcgtaccctattcgtgtcgggcggggatctgcggcagctgccgcatccggctggaagagggagaagtgagtccgttaaagaaaaacgcggttgccggagatggcacaattctcgcctgcagctgtgtaccgaaaacagcgctacgcctggcgccttaaaccgcctgccccagactgtagctgaccgcgctctgcgccggctgcagtctgtcattcatgattttaatgacatcgcccagctgcatgacgcggccggcaagggtgagacccggctgagccaacagacagagcgcggcgttatcgcccggctccaccaccagtaaattcacctgctcgccggtatcgctcagccaaacgcaggcggcgtcgccgccgctcggctgccagtgatgggtatgggcgataaagtgccagcttttcggcatctgcggtttgagaaaacggatggcggtgagcgcgttaaggactaattccgcccgctgctctttcgatagctcgagatcgcgacatttttcttcaaaagagaaatagagcgcggcgtcatcaacgcaaaatccagaaggggcaaaggcatccggagtcagcatgcgccgggcgaagcgcgagcgaaataacatgccattggccagatcgagcatcatgcggtcgtgctcttcatcgtaataccaacgccagttatcgtcaggtttaatccgcatttttccccctgtcccctttcatacgcctctgcaaagctgttgcgacttaccgcagaatattttctaaaattaagaaaagtctaaaatgtttaaataagcaacagtgagggaatataaaacaaccagggccggaaataaagccctgggtgggattcagaggaggaaaagattagatgtgggtaacaatttctttaatcagcggcggacctttaaaaataaatccagaatagatctgcaccagcgatgccccggcggcaatcttttcccgtgcggcaatcaccgaatcaatgccgcccacgccgatgataggcaaacggccattcagctcagcggagagcatacggataatttcagtgctttttaattgtaatggacgaccgctaagcccgccggtctcatcgcaatgtttcattccctgaaccagggaacgatcgagggtggtattggttgcaatcacgccatcaatattatgacgcacgaggctatcggcaacctggatcaattcctcaggcaaaagatccggcgcgatctttacggcgaccgggacatatttttgatgcttctgctgcagctcgagctgcttatttttaataccggagagtaaatcatccagcgcttcgccgtattgcagcgtgcgcagccctggggtattcggcgaggagatattaatggcgatatacccggcgtacggatagactttttccatacaaatcaggtaatcatctttcccgtgctcaaccggcgtatctttatttttgccgatattgatacccagcacgccgtcaaaatgcgcctttttcacattctcaaccaggttatcgacgccatggttattaaagcccatgcggttgatcaatccctcggcatcaaccagacggaagatccttggcttatcgttgcccggctgcggacgcggcgtcacggtgccgatctcaatcgaaccaaaccccatcgcgcccagcgcgtcaatgcattccccatttttatccagcccggccgccagacccagcgggtttttaaaggttagccccatgcaggtgacaggcctggccggtaccttctggcgaaccagcatttccagcggcgtcccggtgacacggcgtaattgttgaaaggtaacttcatgagcgcgctcaggatcgagctgaaaaagggctttacgaacgaaggggtagtacatgaactctcctggattcccggtgtgcaaaccgggggcgtattatgtgcgatctgttgcggaaagggaattgacctgcgacaaaaaatcccccatcagcgcaaacgattacctaccccgcgcgccattatgcgcttttcggctatctaaccgcggataaatcatttagggaaataatggccctctgtcacactcactataaatgttatcaattatagataaatgcaaacatttagttataaggagagagagatgcgcgtcattacgcttgcgggcagcccgcgttacccttcccgttccagcgccttgctggaatacgccagagagacgctcaccgccgccgatatcgaagtctgccactggcatctgcagaactttgccccggaagacctcctgtacgctcgttttgacaacccggcgctgcagacgctcaatgaacagctggccggggctgatggcctgatcatcgccacgccggtgtataaagcctcgttctccggcgcgctgaaaacgctgctcgacctgctgcctgagcgagcgctggagggcaaaattgtgctgccgctggccaccggcggcaccatcgctcacatgctggcggtggactacgcgctgaagccagtgctgaatgccctcaaggcccaggagatcctccatggcgtcttcgctgatgacagccaggtgaccgattaccagcataagccgcagtttaccgcgaatctgcagcggcgccttgatgacgccctggagaccttctggcaggcgctgcatcgccccagcagccgtgcgccgtcgttaacatctctgcgtggggtggagcatgcttaatcctctccgcgccctgactctgggcggactgctgctattctcttcgctgggtcacgccgccccggcggcgcctgacgctctgcgcatcggctaccaaaaaggcagtgtcagcatggtgctggcgaagagccatcagctgctggagcagcgctatccgcaaacccatatctcgtggattgagttcccggctggtccgcagatgctggaggcgctgaacgtcggcagcattgatatcggcagtaccggcgatattccgcctatctttgcccaggcggcaggcgccgatttggtctatatcggcgcggagccgcccaagcccaaggcggaggtgatcctggtggcgcagggcagcccgattcataacgttgctgagttaaaagggaaaaaggtcgctttccagaaaggctccagctcccacaatctgctgctgcgcgccctgcagctcgcaggtctgaaatttagcgatattcagccggtttaccttgctcccgccgatgcgcgcgccgccttccagcagggcaatgtcgacgcatgggccatctgggatccgtactactccgccgcgctgctgcagggcggcgcccgggtactcactgacggaaccgatctgaaacagacgggatccttctatcttgcttcccggccctacgctgaacgcaatggcgctttcattgaaggcgtactcgacacctttactcaggccgatgccctgacccacagccaacgcgcgcaaagcattacgctgctggcgaaaacgatgggcttaccggaggcggtgatcgccagctatctggaccatcgtccccccaccgcggttaccccggtgagcgccgaaaccgccgctcgccagcagcagacggcagacctgttctacgagaacaagctggtgccaaaaaaagttgatatccgggcccgcatctggcagcccaccgccacacaaggagcgaaatcatgagtctgaatatgttctggtttttaccgacccatggtgatggtcgttatctgggtaccgaagagggtgcccgtccggtcgattatggctatctgcagcaaatcgcgcagacggcggatcggctgggcttcaccggcgtactgatcccgaccggacgctcttgtgaggatgcgtggctggtcgcggcctcaatgatcccggtgacgcagcggctgaagttccttgtcgccctcaggccaagcgtggtatcgccgacggtagccgcgcgtcaggcggcgaccctggaccggctgtcaaacggccgggcgctgttcaatctggtcaccggcagcgatcctgccgaactggcaggcgacggcgtcttcctcgaccacaccgagcgctatgaggcctcggctgaatttacccacatctggcgtaagctgatggagggagaaaccgtcacctttaacggcaagcatcagcgcgttcgcgacgccaaactgctgtttccgccactgcagcagccgcgtccaccgctctatttcggcggctcgtctgaggtggcgcaggagctggccgctgagcaggtcgatctttatcttacctggggagaaccgccggcccaggtggcagagaaaatagctcaggtgcgagagaaagccgcccggcatggtcgccaggtgcgttttggcatccgtctgcacgtgatcgtcagggaaaccaacgaggaagcgtggcaggcggcggacagccttatctcccatcttgacgacgagacgatcgcccgcgcccaggcggctttcgccagaaccgactccgtcggccagcaaaggatggcggccctgcacaacgggcgacgcgataagctggaaatcagccccaacctgtgggctggcgtgggtttagcgcgcggcggcgccgggaccgcgctggtgggcgatgccgccaccgttgccgaacggatcaatgaatacgccgcgctgggtatcgatagctttatcttttccggctatccgcatctggaagaggcgtaccgggtcggagagctgctgttccccctgcttgacgtcgcggtgccgtccatcccgcagccgcaaagcctgcgcctgcagggggaagcggtcgccaacgagtttattccgcgtaaagtagcgcaaagctgaggagaccgtgatggcaaaatcaacccatcccctgttgttacgcctcgccccctggctgctgccggtagggacggtcattgtctggcagctggcctcgtccgtcggctggctgtcgacgcgggtgctgccctcgccggagggggtattgaaagcgttctggaccctctcggccagcggtgagctgtggcagcatctggccatcagctcatggcgggcgctggtcggcttcgccatcggcggctcgatcgggctaatactcggcctgatcagcggcctgtctcgctggggcgagcgtctgctggatacctcgatccagatgctgcgcaatgtcccgcatctggcgctgatcccgctggtgatcttgtggttcggcatcgatgagaccgccaagatcttccttgtctcgctgggcaccctgttcccgatctatatcaacacctggcacgggatccgcaatattgaccgtgggctggttgagatggcgcgcagctatggcttatccggcttcgccctgttccgtcacgtgatattacccggcgccctgccctcagttatggtcggcgtgcgttttgcccttggtctgatgtggctgacgcttattgtcgccgaaactatctcggcgaatgccggcatcggttatctggcgatgaacgcgcgtgaatttctgcaaaccgacgtggtggtagtggcgatcatcctttacgccatccttggcaaactggccgacatctgcgcccagctgctggaacggctctggctgcgctggaatccggcgtatcatcttcaggaggctaacgcatgaacactgcccgtctcaacccaggtatcccgctgctgctgaacggggtgacgaaacgctatggcgacaacaccattcttaacgagctggatctgcatattcccagcggccagtttgtggcggtggtaggccgcagcggcggcggcaaaagtaccctgctgcgcctgctggcaggtctggaaaaaccaaacgccggcgaactgctggctggcgcgacgcccctggcggcgatccaggacgacacccggatgatgtttcaggatgcgcgcctgctgccgtggaaaacagtgattgataacgtggggctggggctaaaaggcgcctggcgcgacgccgccctgcaggcgttggccagcgtcggacttgaaagccgcgcacaggagtggccggccgcgctgtcgggtgggcagaagcagcgcgttgcgctggcccgcgcgctgatccatcgcccgcgcctgctgctgctggacgaaccgctgggggcgctggatgccctcacccgtctggagatgcaggagctgatcgtctccctgtggcaggagcatggctttacggtcctgctggtcacgcacgacgtcagtgaagcggtggccatggccgatcgggtgctgttaattgaagagaagaagattggcctcgatttaagcgtggatatcccacgaccgcggcgcaccggttcggcgaagctggccgagctggaggctgaagtactggatcgggtgatgaaacgcggcgacagcgagcgtgcgccgcgtttgtttagtcatggctgaccggagtaactgtctgctgtctgaacgggggcatatcgtcatccgacatgtccccggctcgcgcgttgcacagccgggctaccaacgccaaatcagccgtgtattccaggtcgggtaagcatcgcgccgcccgacaacatcaccacgctaacgggtaacccggacagggcgcaaggcgcgccgcaatccggggttatggcaccgttacgccagcgccttactgattttctcgaacaggtcgccagagagattctccagccccttcagctgctccagcgcggcgcgcatcagcgcctgtcgcttctcatcataacgcttcagacgaatcaacggctcaatcaggcgcgacgccacctgcgggttacgctggttaagctcggtcagcatctccaccaggaactgatagccgctgccatcttcagcatggaacgccgccgggttgctgctggcgaaagcgccgattaacgagcgcacacggttcgggttgctcatgctgaacgaacggtggttcagcagaccgcgcacggtttccaccacgttggctgccgggctggtggactgcaggataaaccacttatccatcaccagaccgtcctgatgccatttgtcatcgtactcctgcatcagcgcatcgcggcacggcaactcagcggcaaccgccgccgacagggcggccagcgcgtcggtcatgttatctgcctggtgatactgcgtcgccaccagcttatcgcccagcgtcggttccgcaaacgccagatagcgcaggcaggtattgcgcagagcacgtttaccaatatcggcgtgctccacccgatagctgtcgagcttattggcgttataaaccgcgaggaattcgtccgccagttcgttcgccagggtgcgggtgagcgcttcgcgcacggcggcgatggcgatcggatcgataatcgcgaacatctcggcgatttcgttggctgacggcagggttaagatctcagcggccagcgccggatcaatcttctcatccagcaggatggcgcggaaggcatccgctacgtgcaccggcagcgacagcggctgcccctgctgatggcggttgacgttcagcttgatgtaagtcgccagcaggctctgcgccgcatcccagcgcgagaaatcattccgcgcgtgacgcatcaggaaggtcagctgctgatcgctccacttgtattccagtttcacaggcgctgaaaattcgcacagcagcgccggcaccggctggaaataaacgttatcgaagacgaaagtctgctcggcctgggtcacattaagcaccgggtgtaccgggtggccgcccttctgcagggggatcaccttgccctcgttatcatacagctcaatggcaaacgggatatgcagcggctgcttctcggcctgctcggcggtcggcggcgtacgctggctgatggtcaacgtatactgctcggtctccggattatagtcgtcatgcacggtgacgattggcgtaccggactggctgtaccagaggcggaagtgcgacaggtcgacgttagaggcatcttccatcgcctgcacgaaatcgtcgcaggtggcggcgctgccgtcatggcgttcaaagtacagctgcatccctttctggaagttttcttcacccagcagggtgtgcaacatgcggatcacttcggcacccttttcatagaccgtcagggtgtagaagttgttcatctcgataaccatatccggacggatcgggtgggccatcgggctggcgtcttcggcaaactgcagcccgcgcatggtgcgcacgttgttgatgcggttcaccgcccgtgagccgaggtcggaactgaactcctgatcgcggaacacggtcagcccctctttcaggctgagctggaaccagtcacgacaggtgacgcggttgccggtccagttatggaaatattcatgaccaatcacgcgctcaatatcgaggtagtctttatcggtggcggtatcggtacgagccagaacatatttggagttaaagacgttgagtcctttgttctccatggcacccatattaaagaagtcgacggcgacaatcatatagatatcgaggtcgtactcgaggccaaagcgctcctcatcccacttcatagagtttttcagcgaggtcatcgcccagggcgcgcgatcgaggttgccgcgatcgacgtacagctccagcgccacttcgcggccagagcgggtgcggaatgaatcgcgcaggacgtcaaaatcaccggccaccagcgcaaacagatagcacggcttcgggaacggatcctgccactgtacccagtgacgaccgttctccagctccccttccgccatacggttgccgttggaaagcaggaacgggtatttcgctttatcggcgataattttggtggtaaagcgcgccagcacatccggacggtccagataccaggtgatatggcggaaaccttccgcttcgcactgggtgcacagcgcttcgcctgactgatacaggccttccagcgcggtgttcgccgccgggctgatctcattgacgatggtcagggtgaaatgctccggcaggccgccgatcaccagctgattgttttcttctttatagtcactccacggctggccgttcacctgcagagcgatcagggtcagatcttcgccgtccaggcgcaatggcacatcagacgcagccgcgtggcgggagaccttgctctcggccgtaacaacggtttttgcggcatccaggtcaaaggtcaaatcgatatcgctaatcagatactccggcgcacgatagtcgtggcggtatttggcttggggctgttgtgtcataaaaaacctttagcatcttcggtaaagtgtcgtcccagtctattcctgttgtgtcaatcgcgctatgcagaatcttcatcttttcaacgtgaaacacggaaatcgctacattttgttaacactcgcggcacgaaatgccctcgacccgacgcaaagcttgtggtgtgatccatgttcaatatattaaactaggcctcgcaaatgaccgtcagcgtcaccattgctcgccatcgcgggacagagtcgggtaataaaggtatactccgcctccattttccgcgttggtttcgatggaacgctccagtgagaggatgctactgcgcaccatgacacaattcacttctcctgtactgcactcgctgcttgatacggatgcctataagctgcacatgcagcaggctgtcttccaccgctacggcgatgtgcatgtggcggcggagtttcgctgccgcggagacgacctgctcggcatctatgccgacgcgatccgcgagcaggtggagtccatgcgcgacctgaggctgcgggatgatgaatatcgctggctgtccacccttcccttttttcgccaggattacctcaactggctgcgcgattttcgctatgacccgagccaggtcacggtcagcaatgacaatggtaagctgaacattcgccttaccggcccatggcgggaagccatcatgtgggaagtcccgctgctggcggtgataagcgagttggtccatcgctatcgttcaccagagatgggcgtcgatcaggcgctcaacacgctggaacataagctaggcgacttcgccaccatgaccgctgacctcgacatgagcgccttccgtctgatggacttcggcacccgccgtcgtttctcacgcgaggtgcaggaaggtattgtgcggcgtctgcagcaggaaccatggtttgtcggcaccagcaattacgatctggcgcgccgtctgaatttaaccccgatgggtacccaggcccatgagtggttccaggcccaccagcagatcagccccagccttgccagcagccagcgggcggcccttgccgcctggctggaagagtatcccgaccagctggggatcgcgctgaccgactgcatcactatggatgcgttcctgcgcgatttcggtccggaattcgccacccgctatcaggggttgcgccacgattccggcgacccggtggaatggggagaaaaagctatcgcccattatcagaagctgggtatcgatccgctgagcaaagtgctggtcttctccgataatctcgacctggccaaagccgtcgatctgtatcgccacttcgcctcgcgggtgaagctcagctttgggatcggcacccgtttaacctgcgatctgccacaggttaaaccgctcaatatcgtgattaagctggtggaatgtaacggcaagccggtggcgaaactctccgacagcccggggaaaaccatctgccacgataaggccttcgtccgcgccctgcgcgaggctttcgacctgccgccgattaaaaaggcaagctaaaaaacatggcccgacggcattctgctatcgggccaatcaatatcactcctgcggcaaacgggctctgacgacctcggcaaaatactccgcgccagttagcaatatctcatcattaaagtcgtagcaggcattatgcaacggtgtattgccctgagcatctgaactatcgccgttgcctaaaaagatgaaacagccggggattttttgcagaaaagcgccaaaatcctccgaaatcatcatctgtgcgacgttgccgtccaccttctcagcccctaccacgttaatcgcagcggtgaccgccacatcaacgcattgctgccagttcaccgttggcgcaaattcatgggtatagctgaactggcacgtcgcaccgtgcatcgcgcaaatcgcttcgctaatggtacgcattcgttcttcgagcagcatctgtacctccggtgcaaagctgcgcgtatcccctttgatttcgacgtgcgtcggaatcgcattgcggatgccatcggtgtgcagttcagtacaggaaatgaccgctggcacgttcggatcaacatttcgcgaaacaattgtctgcaaagccaggatgatttccgccgcaatgaccagcggatctttcgccatatgcggccgcgccgcatgcgctccctgccctttaatacgaataataaagttatcttcactggccataatgccaccgactcgcgtggcgatagtcccggctttcatacccggcatattatgcagaccgtagatttcctctatgccaaagcgttcaataacgccatcgtccatcatcgctctggcgccatagccaggttcctcagcaggctgaaaaacaaagcagaccgtgccgttaaaattctgccgctgcaatagcaactgcgccgcgcccagcgcaatgcaggtatgaccatcatgtccgcagccgtgcatccgctcggcggtcatggagcggtaagaccagtctccctgttcggtcaattgaatggcatcgatatcggcacgaatagcgataacgcccttcccgtcgccgcatttcaatctccccaccaccccggttttgccaatatcgcggtgcacctcaatgcccatagcttcgagcttttcggcaataaaccgtgaagtattctgctcctcgaaggcgctttccggatgggcatgcaaatagtgacgccaggcgataagctgctgctttagctgttgctgattcattctctgctcctgtaaacattagtccatacgctgggcgcgctgtaaaaccacctgcagcagcacattggcgccagcaatcagatctttggctgcgctatgttctttgacgttatggctaatgccatcgacgcaggggacaaaaatcatcccggcgggacataccgacgccataaattgtgcatcgtgtccggcgccgcttggcaaacgtcggtaactgagcgcctgacgctccgcctcggcttccaccgcattgacgatctcatcggcaaaaatgaccggattaaagcgcaccagtgagcggctggttatctccacgccctcttcctgcgacgttttcgcgacaaattcggccaattgctgctccgccagacataagatcgcattatcggtattgcggagatccactgacatgacgacatggttgggaatgacgttgattagattaggcttcacgctgaaatgtccaacggtagctacttgatcgccaccaaggcttagcgccagctcacgggcaaaaacagcgattttcgcagccgccagcccggcatcacgtctcatggacattggggtagtacccgcatgattcgatacgcctctcagggtaaattcctgccacgaaataccctgtacgccggtaaccacgccaatatcaatctgctctttatcaagaattggtccctgttcgatatgcagctcaacgtagctatctaccgccatatctcccggctgacgttcgcctttataaccaatgttacgcagcgcttcatcgagcgtgataccgtcgagatcttttgccgcgagcgcctgcgccaacggatactcgccggcaaacaccacgctgcccatcatatcgggctgaaatcgcaccccctcctcgttagtaaagaaggttaccgccaacggtcgtcgggtgcggatcccggcatcctggagggtggcaatcacctcaaggccggccataacgccgtagttgccatcgtataacccaccggtggcgacggtatcgatatgtgaccccatcatcaccatcggcaacgtctcctcgccgtgataaacgccggtgacattgccgatagcatcaattgacacgctcaggcccagcgccttcatgcgggctacaacaaagtccctgccggctttatcttcggcagtcgctgccaggcggcatacgccgccgcctggcagcgcaccatgttcgccaagtgcatacagggaatcgataagccgttggccgttaatctgcagataatgactcatataacatctcgctaataatggtggttattggaacatgccgtaaaaaatggcagatacggtgataagaccgatcagggtgacgaaaacgttgctcgctttaccgcgccagggggcaagcaccggtaatttatgaatggcgtacataggcaacagcagcagaattgccgccccggtgggaccgctgatgcattcgataataccgaggatactggggttcttgtacgcggcgaaccagcaggtaagcaccataaacaccaggatgaccgcgtcgacgaggcgaataccaggttttttcccgcgtgcggcggcggcctccagaatcaggtcgcgcagcgattcataggcgccgatgtagtggccaagaaatgatttagtaatagcgacaaaggcgataatcggcgatagccaggcaataatcggtgtatcgtactgattggccagataggacaaaatcgacagattctgggctttggcttccgccagttgctgcggcgacaggcttaacacgcagctgagaacaaaaaacagcaccaccaccgtcatgagcaggataccgtagcgctggatctgcgcacatttaccctcagcgagcgccagaccgtaacgctgcttctggcgcaccaccatcggcgaaatgatgggatagtggttaaacgacatcaccagtaccgggaaggtcatccacagggataacatgatcccctgcccatcgcccgtggcgctgaagcttacggtttgcaaaattgcgccgttccagtgcggaatcagaaaaagtgccataaaaataagcgagatgatgaagggataaaccagggtgctcatcacccgcattatcaaacgctgtccgaaacggacgataaacatcagcccgaggatcagaacgatggccaccagcgaccggggaggctcggccattgccaactggtgggtgataaagctctgcgcggtgttggtgatagccaccgcatacataatcagaatggtatagacggcgaagaaatagatgacggtaaatacttttcccgccagcgcgccaaaatgctcgccaataacatcggtaatactgctttccggcgtattggaagagtaaatgaatctcgccagaccgcggtgagccagataagtaataggaaaagcgaggacaaaaacaatcagcagcggccagaagccgccaattccggcattaatcggcagaaacagcaccccggcgccaatggcggtaccgaacaggccaaggacccaaacggtatcttcgctatgccactttgcgggatcggaatatcctttattgataattatattttcagtattcatcggtcaggttctctctatgcatgacgcgaaagcgcgtatgttttcgttatgagtcagaacgcttgtcataccgagggcttgtagggtaggtaagatggcccccttgttattgtcgatagcgctcaaccattacggccaaaccagacgatgtcttcatagacatcgggtgatgtatctccttccgtgctgattaacagaacctgtgcatcggcattcaggcgcagcgatttggcaagctcgcgatacgccggttgagtcatcagcgcataaagcactcctgtgccaatagcgccggattccccggagacaaaaggttcgtcagtacctggacgcggagcggccaacaggcgcatgccattggccgccagacaatcgtcggcggaaataaaacaggtggcatggtcgcggagcattggccagctggtgatgttaggttcaccacaggcaagcccggccatcagagttgacatatccccgccgacgctgtgcggcagtccgtcattaatggttgccgagcgatacaggcagttcgccttgtgcggctcaacgatgatgatggtgggagcctgctgctgcatcttttcgatgaaatatcccatgatgctaccggcaaacgacccgaccccggcttgtaaaaacagatgcgtcggcatcggcgctccgctttctgccagctgctgccagatttcaacagcgagggtcatatagccttgcatgatccatgtggggatctgctcgtagccctgccaggcggtatcctggagtagaacccatccctgctcgcgcgcggttttggccgccagccgaactgtgtcgtcgtagttcagttcagtaatcgtgcattcggcgccatgccggcgaatattctgcgcgcgtaccggcgacgagccctttggcatatacaccaccgcacgcagcccaagctgctcagccgcccacgccacgccacgtccgtggttaccgtcggtagcagtcacaaatacgatgtccttgatacgcgccttaatcactggtgaattaagctcggcaaagctcaacgtattaatatctcgctcaagcagagcggcgagatatttccccatcgcataagatccgcctaatcctttaaacgcattcaaaccgaatcgctgcgcttcatcttttatatggatcgatcccagccccagccgctggcttaaaaattccagcttacgcagcggcgtgacccggtaatcaggaaatttttgatggaatgccagcacttcgttccccacgctttcattcagcagactcaagtctgctccctggccatagggctgccgccgggcgttaagttgatatttaattgtgtccactattcaggcacctctattttcatatcgtcctgcgacgataacgttatttgcgaccattccgcctaaacaacgggtgcacggatccgtgcggcctgagacaggacggtcgctttaaattggttaagtcagaatgtgagaggctttttgtcgcgatataccgctttcccactgcctgtgatggtacactgcgcccggcggttaattggcgcaaagttgcccatcgcgccgcaattttcactctgttttatcattctcacgcaacaacgttgcattagtgaggttgatcacaggcttgcaggacgagatatatgatgaaacttgacgcatgggataaaaaaattcttacgctcttgcagcgtaataatcgcttgtcgcaacgggagatcgccgatcggatcagcctgtctccttcggcagtcaatcggcgtatcgctgcactggaggatgcaggagtgattaaaggcagtgttagcttagtggacgccagtaatgtgggaagaccaatcaccattatggtgcaggtgaccattgagaatgaacgtctcgatctgcttgaggaggataaacagcgtttcgtaacctgcccgcaagtgcagcaggtctactatgtcactggcgacttcgatttcctgctcgtgatcaacgtccgtgatatggcggaatacgaagcgctaacccgtgaactcttttttgcctcgggaaatatcaagtctttccggaccatcgtgtcgatgcaaaatgcgaagcaggaaatgacggtcattatcgagtaagtcgtgtaaaagtcgacatggggagccaaagaacgccccggaggtgtatttatttccgaaatccacccttccctgtgcgaaatctacttgtctgatggaagatgacaggtaacatagatatccccccgctgttgggggaagagacttttttattggactacatagagagattattatgagcgttgtgcctgtagccgacgtactccagggccgcgttgccgttgacagcgaagtcacggtccgcggatgggtgcgtacccgccgagattctaaagctggcttttctttcctcgccgtctatgacggttcctgctttgatcctgtacaggccgttattaataattctctgcccaattacaatcaggaagtgctgcgtctgaccaccggctgctcggtgattgtcaccggtaaagtcgtggcttctcagggtcagggtcaaagctttgagatccaggcgaccagcgtggaagtgaccggctgggtggaagacccggacacctacccgatggcggccaagcgccacagcatcgagtatctgcgtgaagtagcgcacctgcgtccgcgcaccaacctgattggcgcggtagcccgcgtgcgtcacaccctggcgcaggcgctgcaccgcttcttcaacgaacagggcttcttctgggtttccaccccgctgatcaccgcctccgataccgaaggcgccggcgaaatgttccgcgtgtcaacgctggatctggaaaacctgccgcgtaacgatcagggcaaagtcgatttcgacaaagacttcttcggtaaagagtcgttcctgaccgtttccggccagctgaacggcgaaacctacgcctgtgcgctgtcgaagatttataccttcggcccgaccttccgcgctgagaactccaacaccagccgccacctggcggaattctggatgctggagccggaagtggccttcgccaacctgaacgacgttgccggcctggcggaagcgatgctcaagtacgtcttcaaagcggtactggaagagcgtgcggacgacatgcagttcttcgccgagcgcgtggataaagacgctatcgaccgtctgcatcgctttatcaccgctgattttgcccaggtggattacaccgacgccgtcaccattctggaaaactgcggcaaacagttcgagaacccggtgtactggggcgtggatctctcctctgagcacgaacgttacctggccgaagagcacttcaaagcgccggtggtggtgaaaaactacccgaaagacattaaagcgttctatatgcgccttaacgaagacggtaaaaccgtcgcggcaatggacgttctggcgccgggcatcggcgagattatcggcggttcccagcgtgaagagcgtctcgacgtgcttgacgcgcgtatggcagagatggggcttaacaaagaagactactggtggtatcgcgacctgcgtcgctacggcaccgtgccgcattccggcttcggtctgggcttcgaacgcctcatcgcttacgtcaccggcgtgcagaacgtccgcgatgttattccgttcccgcggacgccgcgcaacgcgacattctaaatttttctgacatcaatctgaaaggccagcgcaagctggcctttttttatgtcaattactgttagtaaaattcaacaaccttaaacatcaagacccggaaatcacaattatgttacgcactgtttcggtgcatcctggtgatgtagatcgcactttatgttcataactgagcaaaaccgctgataaatttgctcattttttgacctttacccgcacatcttgcaaagacagagactgaataaaaagaatacgaattcaatacacaaaatgaacgaattgccgcttagccaaattaatcataaataattcatatagatagataagtaatggcgtttgcccttatccggtggaacggaattttgattaagttcacaaagttccgctaaatacacatttagttacatgatttttcgttttgttactcatatgagatattcgtagcattttccggctagcgaaacgttgtcgcggatggaaagatgccttcagacaccaaactctcatcaatggttctgtaagtttttattgacagaacttattgacggcagtggcacgtgttcatataaaaaatattaatgagggtaataaataatgatgaagcgcaatattctggcagtggtgatccctgccctgctggtagccggtgcagccaacgctgcagaaatctataacaaaaacggcaacaaactggacttctatggaaaaatggtcggcgagcacgtctggaccaccaatggcgacaccagcagcgacgataccacctatgcccgtatcggcctgaaaggcgaaactcagatcaacgatcagctgatcggctacggccagtgggaatacaacatggacgcgtccaatgttgaaggttcccagaccacaaaaacccgtctggcgttcgcaggcctgaaagcgggcgaatacggttcattcgactatggccgtaactacggcgcgatctacgacgtcgaagcggcaaccgatatgctggttgaatggggcggtgacggctggaactacaccgacaactacatgaccggtcgtaccaacggcgtcgcaacctaccgtaactccgacttcttcggtctggttgacggtctgagcttcgcgctgcagtaccagggtaaaaacgaccacgaccgtgcgattcgcaagcagaatggcgacggcttcagcaccgcagccacctacgcgttcgacaacggtatcgcactgtctgcaggctactccagctctaaccgtagcgtggatcagaaagctgacggcaatggcgacaaagccgaagcctgggcgacctctgcaaaatatgacgctaacaacatctatgcggccgtcatgtactcccagacttacaacatgactccggaagaagataaccacttcgctggtaaaactcagaactttgaagcagttgtacagtatcagtttgacttcggcctgcgtccgtccatcggctacgtacagaccaaaggcaaggacctgcagtcgcgtgctggcttctccggcggcgatgcggatctggttaaatacatcgaagtgggtacctggtactactttaacaagaacatgaacgtctacgctgcgtataaattcaaccagctggacgacaacgattacaccaaagcggctggtgtcgccactgacgaccaggcggccgtgggtatcgtttaccagttctaatctgcagtacaccccttcgtgatatgccttcaaagcaggacttcggtcctgcttttctgtattcgtgagacaaagatcgtctctttcgaaaaccttcgcgctttttgtcgcaaacggttggcaattcgttattctcccgttaacctgatagcggatttcccttcagtaatcacaatggaacctcgtcatgtttgagaacattaccgccgccccagccgacccgattttaggtctggccgatctgtttcgtgccgatgaccgccctgaaaaaattaacctcggaattggtgtttacaaggatgaaaccggtaaaacgcccgttctgaccagcgtcaaaaaagcagagcagtatctgctggaaaatgaaacgactaaaaactatctgggcatcgatggtattcctgaatttggtcgctgcacccaggagctgctgttcggtaaaggcaatgcgattatcgctgataaacgcgcccgcaccgcgcagacacccggcggtaccggtgcgctgcgtgtcgccgcagacttcctcgccaaaaacaccgacgtgaaacgtgtgtgggtaagtaatccgagctggccgaaccataaaagcgtattcacctctgccgggctggaagtgcgcgaatacgcatactacgacgcggctaaccacgcgctggactttgatggtctgctggccagcctgaacgaagcccaggcgggcgacgtggtactgttccacggctgctgccacaacccgaccggtatcgatccgacgctcgatcagtggcagcagctggcgcagctgtcggtggaaaaaggctggctaccgctgttcgatttcgcctaccagggcttcgcccgcggtctggaagaagatgctgaagggctacgcgcttttgctgctctacataaagagctgctggtcgccagctcctactcgaaaaactttggcctgtacaacgagcgcgtcggcgcctgcactctggtcgccgcggatcaggagactgtagaccgcgccttcagtcagatgaagtcggtgatccgcgccaactactcgaacccgcctgcgcacggcgcctccgtggtcgccaccattctgagcaacgatgcgctgcgggcaatctgggagcaggaactgaccgatatgcgccagcgcatccagcgtatgcgtctgctgttcgtcaataccctgcaggagaaaggcgcgagccgcgacttcagctttatcagccagcagaacggcatgttctcattcagcggcctgactaaagagcaggtgctgcgcctgcgtgaagagttcgccatctatgcggtagcttccggacgtatcaacgtggccgggatgacgcctgacaatatggcgccgctgtgcgaagccatcgtcgccgtactgtaagcgatagtattcggtataaagaaaaaggccgcgaatgcggccttttttatgtgttcgcgtcatgtctgttaccagaccggcatctcatcctgcagaaacggattattacggcgttcctcacccagcgtcgacagcggaccatggccgggaataaaggtcacatcatcgcccagcggcaacagcttttccttgatagccgcaatcagctgcccatggtcgccgcgcggaaaatcgctgcgtcccaccccgcctttgaaaatcacgtctccggagatcagcagtcgggaggcgtcatcaaaaaagaccacatggcccggcgtatggcccgggcagtgcagcacctgcagcgccacattccccacattgaccacatcgccttcattgagccagcgatccggacgcagcggttggcaatcctccaggccgaacatccggctttgcgccggtaatccttccagccagaactcatcctctttttccggaccaataaccggtacgccataatgctgcgccagttcagccgcggcgccaacgtgatcgaggtggccatgcgtcagcaggatctgcatcagcgtgacgccagcctccgccaccaccgctttgatacgttcagcatcgccgccaggatcgaccagcgccgccagccgggtttgcccgcaccagataagagaacagttctgcgcgaacgcggtaaccggaataatacgatagttcatgacgctcctttcgttaccagtgccttacgggaccggtatcaatatgcacaaagttactacgtgggtaatatcctacaccacctgcgcgcatagataacgccgctttgcgaatattgcttaacgaaataccttcaatatggaaatccatcgcctgccccttggtgtgatagctgtgtttcgctacaccacggctgcgtgcgcgaagctcatcgttggtatcaagggaacgatagccagagataagctggacaggtttgttggtgccaagtagtccctgcaaccgataaagatgatcgaacagatttggatcgatggacttaattttattcgcgcgatagtcacggaaaaaatggttaagtcttgctaattcatcctgaatatagcctctgccatcgaaaaactccgccctgagcgattcaccggtatgcaggttattcagcgtcaaaatacgcggacggggggtcgagagggtggcaaatgccggcgcagggagaatggcggcagcacccagcgcagcgccacccaacgccagcaatctgcggcgattagcgtcaaatttgtccatgataatcaggtctacagtcaatgaatcgttatatactttttccgctttgcgcgatgccaggatcagctcgctatcgctcgccacgaccgagatgttgcccggcaaaggagagcgttcgcgctaaccgcgctacgcattgagcggaatgatatgtatatgcacttctggcgcacgaaaggcaccttaccgggcattattgccaacgtcaaggcagcctcaccccaggaaaatcgggcgctgcagaggtgcagcgcccttttttacccagtgctaggacaacaaaatccattgaactacttcatttacctgattaattgttccgctttcgtcagaatttgtgcgctggatcgcgcggtgatatcgtaattgtaaatatctgttcgatattgtgtacgtccatcagcgtccacaaacgccgttaagtaatataaattcaccggtatattttgccgaatattgacatagcgcgtatccccctgcttcagggcgtcggaaatgcgcgtgtcattccagcccgcgtcctgcagcagcatattggccagctccgaggctttattgaccctgacgcagccggaactgagcgcacggacatccttctgaaacagattatgattcggcgtatcgtgcagatagatagcatccgaactcggcatattaaacttgtaacgccccagtgaattacgtgccccaggcgcctgctgaaaacggaacggtaaattgttctcggtgatggttgaccagtcaacccggtaaggatcgatggtctctttactgttccagccgcgcatcacggtgtagccatgctgctccagatagccaggattattacgcaccttcggcagaatatctttgcgcgccagggtgggcggtacgttccacggcggattgaccactacgttgttcagcgcgctgctcatcatcggcgtcttgcggtctggacgtccgacgatcacccgcgaggccagcacctgactgccgtcctggtaatagaccagcgaaaacgcgggaatattcaccatgataccggtcgatagtttgcctggcagcagacgtagacgctgaatgttcagcgccagcacgccagcgcgctgcgccgatgagacattgagccagtcacgggtggattggccgatgaccccatccgcccccagcccctgcatggcctgaaagcgcttaacgccctccaccagctggcgatcgtacacaccgcgcgccgcgggcttgctttttttcttcgccgaaggactcaccacgtcgccgggcagaacgatattggcggaattttccagcatcccggtacgctggaggatctcgcgcagcgcgccgatatcattgctccattctcccggacgcagcgagccgctgccggtcatctgcggccatggacgtgaatcagccaccagcgccagcagcgactggtgcatggcctcatactgcggatgacgcggcgccaggccggcgataaacgccggcagggagccattatccagcgccagctgccactggttaatcaccgacagcggcggggtcgccatcttgtacggtgtcgagctatataaccagcgggtcccctgggtggggatgccgctgataaagtgcagatagcccatcatggcatcagacaacaccacatcgcgcgccataccgctgacggcaggatcggtcagcagactgacccaggtggtaaactgcggctgaaaaccggcgatggcgatctccgccagctgctgctggaacgcctgcaccgcctcgcggttttcccacatcggtttcatatccctggcggcgtatagcgagaccagcggattcataaagacgggtttgtagccagccggcaatagcgcttcgatctgggcgcgactgttcgccgcggcttccatcgacagcggctgctcaccggccagcttcgcgaccgccggcgattgcccgtcgctttgcgacagcgcgacggaaagctctccaggcgtagcggagctatcacctggtacgacttcaggctctgcggcctggacattgaacagcggagcaaatgccattgccaggctcagactgagcgctgacaatggacgaccataccgtttcttaagcaacatcccttgccccctgttgtcacacattgccgcccacaaattcgtgggctttaacacagtatataaagacgaaaaggcttttgccttacctaatgtaaagaagcttaaagattataccaccctggcatagcaagctggatagcaaaaagggcaacttaacgttgcccttttcagcgcttacccgccagtagtgagctgcatcgtcaggaggcgtcggccgttcccggcagcgcttccggcagcggcgcggcaaacccgcgcagccccacgacgtgcacatgttcgtgattattgaacaccttacgcaccagtttataggtagtgcctttttccggactgatgttctccggcgctgcgataatcagctgcatctccagacgttcgcacagctcgaaaagggtggcgatggagcgggcgtcgagacgcgccgcttcatcgaggaacagcagacggcaaggcgagatatccttgccgcgcaggcgacgggattcatcttcccaactctgcaccaccatcaccagaatcgacatcccggtaccgatagcttccccggtagacagcgcgccggactccgcgcgcagccagccgtcggagccgcggttaacttccacttccatctccagatagttgcggtagtcgagcagctcttcaccgatggtttgcggcgtgcgctgccccatgtcgatctgtgggttgagacgctgatagagcttggccagcgcctcagagaaggtcagacgattgctgttaaacagatcctggtgctgctcatgctgctcggagagcacgtcgagcagcatcgagtgggtctcacgcacattgacgttcaaacgcacgctgttgacctggccgaaggagacgctctgcagaccctggttgagcatccggatacggttctgctcgcgctgaatggttttgcgaataatgttggccacgctgcgggaactgatcgccagcttctgttcacggttggtcagctcttcggtcaggcggctgagctcgatctccatctgctcgatcgcttccaccggatcatcggtgcgaataatatcctgacgaatacgctcgcgcagatgctggtatacggcaacgaagaactgaattttgcgctccggacgcttcggatcttccgagatacgcagcacgtcacgcagatgttcgttatcggcgaccgccagacgcagcgcccccagcgccttatccgacattgaacgcagctcatcggcggagagataggccagctcgcggcgatgcagacgacgttcgacgccgttgtctttcaccagacgcatcaccgcgcaccagcccgccttggcggtcaccacctgctcgcgcatttcgcagtaatcgcgctccagcttgcgcagtttacgggtcaggttgtccatttccgcttcgcagaaggtcaacgctttctccagctgattgcgtcgggagcggttattgctcagctgcatgtgcagttcatcgcgacgcgcgcgagcacgctcttccgcgccggcgtcggcgcgcacgccaatgtcctgcaattctttatacagatcgttgagcagctctttcttggtgtcatacgagctcttcagcgaggccagcacctgattgtactgactaagctgcgccgcatgggcacgcatcgcgtcgcgcgcgcggctgcgttcggactccgcctgctccagacgctggcgcagcttctcgttgagatcgctgttgccgctgagcatttccgccgaatcggagtagctgaagtgggccctgcgctgcacaacttccgccagggcaaaagcctgctgacgtgcatcgcgctgggtttgctgcgcataggcgtaatcttctttcagctgctcaaactgctccggatcgctctgcagcaccgaaacaataggctccagcttcgccagctggttaccgtgctgctgaataaagcgcgcaacctcctgcgcttcgtccagacgttcctggatctcgtccacgcggtcggccagcgtatcatccgccagcaggttcaggcgcggcagcaggcggttgagcgccgacacgccctctttcgcctgctcgtactgcacacggttctgttggttatcgctttcatgggcgctcagcgcacgctccagctcgccgcggcggctgttgagtttgcggatctcttcttccggatcgtcctcgaaagccaccgccagatggctgccgataaagcggctgaaggcctggtgcaggcgctgggttttctgcacatcgaacgacagggtcgcaaaacgctctgacagcgattcacgctcggcatgcagggtttcaatgcggttttcacgtgccgcgcggccaaacagcggcagcgacgggaagcgcgaataacgccactggcgatcggcaatcttcaccaccaccgctttttccagctcgtcgacgctgaatacgctgtcatcgaaggactgcggatcgccttcgatcagatagagatcttccgggcaatcttccagcccctcaagctgctcggctacccgcgacagatccggcaccacgatcgcatggcgcgacggaccgtacagcgcggagaagtacggcgcatcgtcgaggctaacgtcgtcatagatttccgacaacagcacgccgccaaagcgctccgccagcgcgttcagacgcgggtcttcagagccgcccggctggctgagacgctcaatttcttcgtcaatggcgcgcttgcgggcgccgacctcgtcacgttcaacgatagcctctcgttcacgctccagcagctgctgcaggtattcggtgacctcctggccggacgcaaactgctcgccgctttgctcgcacagctggttaaggctgttctgcgccgccagccagaccggcgcccgacgcatcagcgtctgggtacgcgactgcagttgctccagctcctgacgcagcgccatgcgctgctcctgagcattggagacgctgtcggccagcgacgcgatgcgcgcttccagctcctgatgcagcgtttccagatcgtcgatatcgtaacgtttaccctggcgtttgcagaactcggccagctgacgctcagcgtcctgctgctcgcgcaggcgctgttcaagctcgttgaggcggctgcgcagcccctgcgcctgctcggcctggtggcgctggttcacgccgtcgcgcagcaattcgcgcgccacgtcccaggcttcattgcgcgccagtgggccgttaatcgccgctaccaactggtaagcctgttcaaactggctgtgcgcggtttgcgccacgctcattttctgttccagcgacagcattttctccgtcgcttcctgctctttcgcctggaaggtttccagccactcgtcggcgctctccggggtcagatccggcagatggcacagcgccttcgcgcgctccagcgcctgcagcgcctggttatactgaatggcgcgggtctgctgcacatcgagcgcctgctgatagtcggcgagctggcttttcagctcatccacttccagctcggcggcctcagcgcgggcttcgttctcttcctgacgatcgacggcttccgccaccacttcattctgctcttccagacggatctgcagctcgtcgagatccgcttcgtagcgctcgattttttcctgctgacgcagcgcagtctgcaccaggttcaggtgatcgctggcggcctggtaatcggcttccagatcgccctccgcgccgttatgctcctgcagttcgcgcgccatgtcgacgtgcttatactgctcagccgccagctgcgaacgcgaggtgaagagatcgcggcgatactccagcgccttatccaggtgaatgcgcctctcgttggcgtgacgcatatagtccgccgccacgtagttggtggcttcgctgatcaggtgtttaaacagatcgcggtcggactgggtaacgcgaatggcttccagcgtcatgcggttttcccgcagcgccgcttccatatcctggaacgctttacgcacgccgctgttttccggcagcaggtagtcgcgcagcgagcgggtaatggtgctggagatcccgccgtacagcgaggcctcaatcaggcggtagtacttgctacgatcggaggcggaacgcaggcgacgcgccaccacgcccagatcgaacattagcgagtgatattcggtgatcgagttgaactgtttaaactggaccccttccatcgcctcgagtttatctttcagctcgttgaggctcacgacgcgcgcctggcgatcgttcagcgtttcggtcaacagctgggtcggcaggatagaggtcggcagtccctgaatggcgaaaggtttaatatcgactttacgatcgcgcccggcgacctgctgcaggcgcacgccgaccaccacgcgctggtggcgggaattgatcacatcgagtaccgagtaacacaccccggcgcgcagcttaccgtgcaggcctttatcgcgtgagccgctggtggcccccgcttcggtggtgttacggaagtgcagcagggttaaatccgggatcagcgccgtgacgaaggccgccatggtcgtggacttacccgcgccgttccccccggagagggtggtcaccagttcatcaagatcaaaggtccgggcaaagaagccgttccagttaaccagcgttagcgagcgaaacttaccgcgttcaatcattactcttcctccccgctatccggctggttttcttcattctcatcattgagctgcaggtgattttccagggccatcgcttccccgtcgcggatcagacggcgctgcgcttcgcgcgggtcgtcgccggcgcgcacatcggcgccaaagcggaataccgattcggtaatgcgaaacttgctgctatcgtggcccataaaccacaccatccccagacggcgtaagcggttaagcgaggcccgcattttttcctgcagcttctggcggtccagatccgaaccggtggaacggttgttcaccagcttcagcagcctggattcatcggccagggtcagcagctcgtcatagagctcctgctgggtaaaaatcccttcgttcgccaggcgctccgggctgagatagagatagcaaagaattttgcccaccatcatatccagctcggacagtaccgagcgcgaaatcagcgtggtggaccgcgggcgcaggtagaagaatccctccggcgcgcggatcagctcgacgttatagcgagcgtaaaactcttccaggtaatcctgaaaatccatcaaaaatgcgtgattatccagctcgtcgagaccgatatgacggcccgcgcgcagggcgctgtccagcgccggaaataacggattggccaacgcctgcgccagcttaaccggcatcacttgttcaatatttgtcaatgacatgcgcctgtaccttggctccgtaatcattaatcggctgccattttgccggcagtccggtgaaatctgcctgggcgacgcccagctgtaccgcctgatccacgacgatccgcgccacgtcgaagtgacgcccgcgcggatactgcgccaggaactcccgcgccaccaggccgagatccagcggtattcctttctctttatagaccgccagctgcgcttcgatcagcgccgccagctgctcgcgaatttcgttaaactcttcaaattcgaggtccgccggcagctcgccggtgacctcttcatcgcgcagggccatctcttcatcgcgcatatccagcaggcggtcggcgttggcgtaagttagcgcccacggttcatcaaaataggtctgcaccgactggcgcagacgctgggcgaagacgcggttcttatccatatcgatagcggtacggataaacttgtgcacatggcggtcgtagccgatccacaggtcaatcgcctgctgaccccagctgacgatgcggtcgagcttgctttgcagatcgaacaccagccgatcgacaaaatggagatcgtcgcgcgccatggtcgagtcctgaatgcgcagcaggttcgcctgcagcttatcccctgccgcatccagcgtatcctgcaattcgcgcagggtgccggaggtttccgacagcagcagttcacagctggaaatcgccgcgcgccagtctttattcaacaactgcgcgatatcgtctttcaccagctgctgctgctcatccataatgcgctgcgtcaggtcgatgctgtcgaaaatttccgctacggaatacttcagcggcgcaaaaacgttgcgatgccagtggaattcatcaccgccctcttccgcggcgtccgccgcgcgcttcagctcgccggcgacgatcgacagctgcatcgagagacgcagcgtcgagaattcgcgctgacggatataataatcggtgatcccaatccccaacggcgtcaggcgatagatcgcattgccttcggtaatttcgctggtaaagcggttcagcagacgctggcgcaccaaatcgttgatcgcgttattggcgcgctggctgatggtttcgctggtctgctcaaacgcatcactgacgtggcggaacgcatccaccagttcaccctcgctcatttccccttccagtcgttcaccattcagagtggcgatcgccagcaggaaagagagtctgtcgaccggtagcgagattgaaaaatcattttttctggcccaggcaaccagttcggggactgtctgggaaaattcactcatactttatccttgcatctgcggctatgagcctggctcttaagcgcggtgacatgaatataacggcccaggctgagatacggctcctgacgacagtagcgcgtctccagcgccagcagcgccgcatagctgtcatgctgttggcgtttttcacgcagataatcatgaaacacccgcacgccggttttgctgacgatctgccagccaatctcttccagccagtgataaacctgctgtggttcacgcggataatccggcgacagcgtgcgttttttcttttttggcatgcccagttgaacgtaatcaaaattaccggcaaccatattgtgcatcaacaggccgttagcattgtagaacatcaatgacagtccaccgccagcacgcagcgtcgaccacagggtatgcagtatttcctggggctccgccacccactccagcaccgcatgaaacagtaccagatcgaccgggctttccaaatgctgcgcaatatcctgagccgcgcattgtacaaaatgcatgttgtcgatcacacctttatcggcggccgcctggcgggcgcgagccaccatctcagcggagagatcgcagagcgtcacgtgatggcccagttgcgcgactttgatggccgtttgcccttcgccgccgccggcatccagcaccctcagcggtcccggccccagctgcgccaacagcggttccagatcctgccagaggatcgcctgacgcaactggccttttgtggtgccgtaaatattgcgcgaaaacttttcagcaatgtcatcgaaattgcgatcctgcacgagtgactccacaagccaacacaaaaccgctattttgtcatacccgcgccgagaatgaagcgatctgttataagatccgaacataactttggttatatggttaaaaaaggaaccatctggcatgcttttcacgctaaaaaagatcgtcggcggcctgctgttgccgctacccgccttactgttgctgatcggtatcgggatcgcgctgttatggttcagccgctttcagcgtaccgggaagctatgcgtgagcctcggctggctgctgctgacgctgctgagcctgcagcccgtggccgacagcctgctaaaaccgattgaagatacctaccccacctggcgcggcgagcagccggtgaactacgtggtggtgctgggcggcggctatacctggaatccggagtgggcgccaagctctaatcttatcaataacagcctgccgcgcctgacggagggcatccgcctgtggcaagcgaatcccggttcgaaaatgatctttaccggcgcggcggcgaaaacgaaccccgtcagcacggcggaagccggggcgagagtggcggagagccttggcgtacctcgcagcgatatcattgtgctcgatcggccgaaagatacagaagaggaagcgctggcggtgaagcgcgccatcggcgacgcgcccttcctgctggtcacctcggcgtcacaccttccgcgggcgatgatattctttcgccatgccggcctggatccgcttcccgcgccggccaatcagctggcggtgacctcgccgctcaatccgtgggagcgggccattccttctccagtgtggctgatgcacagcgaccgggtcggctatgaaacccttggtcgcgtctggcaatggctgaaaggcagctcaggcgagccagggcaggagtgattttgcagcgaggtcaaaacgggcgcgatcaaagcgcccggtgttgaccagactatccacctcatcccacagcagataaagccagcgccgccagacaaaggcctcggaaactggcgcctgctgcaggtagcgccacagcagctgttccgcctggccgccttcagcaaggcggaacagttcatactcgcgtggcgcccacagcatcatccccggccccaccatcgccagcagctgatcgctgcgcggatcttttagcatgctgcgcagagtgaagttgccatgcaccagcacagcattatcattgaaatcgcggaacagctccggaaggcactcgcgggagcggaacaaaaggcgcttatcctgcatggtgagaccggtgtcctgatacaggttcagggtgctccacaatatctctacccgctggcggtaccagttcggccacaggttttcctgggtattgtcgaccattcccacgcagccgccactgtcctgccgatgccacgccagcagcccctcgacgatttgctcctgcagttgctcccagcgcgccggggtgcgcgtcggcgcctccaccggtacgccgcgcaggcgctcaagcagcagcacatctggtccgggatgttcttcgtgcgtcatgacgccataaaccaccggcatacgcaccgtaccattacgcgccagggtcgagatcttccatgccagctgccgcgccacgccgggcgtggtgaaacttcgcgccagcagcggcatcgggtttccctgcgcatcgtacaggaaccacagcgccgtagcggcttgttcactgacacactccacccggcttagcttttcgccaagaagatgactgagttcggttcgcaactgttccattgtcgattacccctatgaacactactggtttcataatgagcgcccgcacctggcttgtcatcggataagatcaaaaaggggtaaaaaaagcgaaaaaccgacggggatatcccctccagcaaggaggggacagaggactaacgcagctcagcgcggacgcgctccagatcttccggggtatccacgccggtgccgggcacttcggccgccacggcaacatggattttctcgccataccacagcactcgcagctgctcgagcatttcaatctgctccagcgggctcggcgcccagctgacatagcggcggataaagccggcgcgatagccatagatgccgatgtgccgcagcagggagtcaccgatggtctcgcgggtttgggcaaagcgatcgcgatcccagggaatagtcgcgcgggagaaatagagcgcgtaacccttggcatccatcaccactttgaccgcattcgggttaaacgcctcttccgcatcatggatcggtaccgccagggtcgccattccgctgctgctggcagccagattctccgccacctggcggacaatcgccggggggatcatcggctcatcgccctgaatattgacgataatggtgtcatcgctgaacgcgcacttttccaccacttccgccagccgttcggtgccggactgatggtcggcgcgggtcatacagacctcgccgccggcggcttcaaccgcccgggcgacatcttcgtgatcggtggcgacaataatgcgatccgcgccggattcgcgagcgcgctccagcacatggacaatcatcggcttaccattaatgtcctgcagtggttttcccggcaggcgcgtggaggcgaaacgcgcaggaataatgaccacgaaactcatgagtgactctcttctagcgccagcggacgcgcctctgtctccagcagcaccgggataccgtcgcgcagcggaaacgccaggctatcaagtttgcaaataagttcttgcttatcctgactgtaatacagcttgccgttacagaccgggcaggcgatgatttcaagtaaacggtgatccatgtttcctcctgatggaccggatagatttctcagcagcatatcacaggaaggcaggcgccgggatcaatcggcgtcgatttcccacccctgctcctggccgacaaacagcccttccggcaggcgtcggcaaaggatccgctctgccgattgccagtgtgcgaagtcgttaatcgcccggcgcagcccctgctccagaccacgggtgatcttcaccccctcctccagccacagggcgaagatctccagctcccggcttttgcgatgtattttactgtccatccgcccgaccagttttccctggtgcagcagaggcagtacgaagtagccatactgacgcttcggcgccggggtataacactccaggcgatagctgaagttgaacagctgctcagcgcgtttccgatcccagaccaccgggtcgaagggcgagagcacggcgctatggctggcggtcagcttaccgccgggcgcggtctccagctgcgccagcgcctcgtgatgcagccacatctcgccgagtgcttccacgttaaccggcaccaccagcccctcttcctgccaggccgccagcagacccggtagcgccggctggcgcaagcgatagtaatcggccagccactgggcgcggaagatgccgaggctacgggcgctattgcgcaacataatggcctctgcgtcttcgcgggagagcgcgtcgcgctcgtcgtcccagtccggcatcacccgccgggttagatcatacacgcggtgaaaattgcgccgctccaccaccatcacttcgccggcggtaaacagcccttccaggtggcgcttatgcggtttccactcccaccagccgctggcgcctttgcgcgggtgggtaaaatccgccgagcgaaccgggccgttttgcccgatatgcgccaccagctcggcaatactcccggcatgctcctccatccacgcgcgatggtatttccagcccatattgtcgggattcaacatgcgatggcgcaccagggcgaaatcgctgcgcggcagaaagcaggcttcatgcgcccagtattccattagctcgccgttgcgcagcgactcatccagccagtgctgcggatagctgccaagacggctgaacagcaccaggtaggggctgcgggccaccacgttgatggtatcgatttgcagcagcgacatctgctggatggtggaaagaatgtctttcgggcgagcgcgacgtcggggcttctttaacaacccctgcgccgcgagatggaggtggcgcgcctcgttaagcgatagttgcaataccgacatgcaggttctccgtcaggaattccagcacagcggcgagcaaagccggcgcgtcagttaacgttgcgccaacgtcgctaagtccgcaagcaaccgctgtgcgcgttcatcggccattatggcgtcgaccggtaaataccaccagtttgcagcggcgaaatcgcggcatttcacggcatctttctcggtcatcagcagcgtctgatcggcagtcaccagggcggcgacatcatcctggctcagcgcctgatggtccgccagcgccacggttttgaccggctggacgccgcagctttcgagggtgacgaagaagcgcggcggatggccgatgccggccatcgccactacgttcgtgaaggtggagacatcgcgacgttcgccggtaagcaggttaaccgccatccctgggcgcagccgcatcgggatctcacccggacgcgccacgccgccgttaacgataaccgcatcaacgctttgcaagcgcgacgcccgctcgcgcatcggcccggcaggcagccaccagccgttgccaaagcggcgcacgccgtcaataacgacaatttctctgtcccgcgcgagcttatagtgctgcaacccgtcgtcggtcacaatcatctgcagatcgtgcgcgctgagcaatgcttttaccgcgtcgctgcgtagcggagcgacagcgaccggggcaccggtacgctgatggatcaacaccggttcatcacccgccagcgccgtactggttctgtcgtccaacaccagcggatagcgttcagctttaccgccgtagccgcgagacacgacgccaacgcgaataccgcgctgctgcagctgctccaccagccagatcaccaccggcgttttgccattgccgccggcggtcaggttaccaaccaccaccaccggcaccggcgcgcgccaggctttttgccaccccagctgatagctgaggcgaatcaccccgctcaccaggccatacagccaggagagcggcagcagcaggcgccacagcggcgattccccggaccagatgcgcgcgatcattcgccgaattgcatcttatgcagctgggcgtacacgcccttatgctccagcaggtcatggtgcgttccgcgctccacgatccgcccgtcttcaaccaccacgatttcatcagcctgctcaatggtcgacagacggtgagcgataaccagcgaggtacggtttttctgcagctcatccagcgccgcctgaatggcacgctcggactcggtatccagcgccgaggtagcttcatcgaggatcaggatcgggctgttacgcagcagcgcgcgggcaatagcaatacgctggcgctggccgccggacagcatcacgccattctcgccgatgatggtatccagaccattatccatcttgttgatgaaatccatggcgtaggccatgcgcgcggcctcttcaatctgctcgcggctgtactcttcggtacgggcataggcgatattgttggcgacggtatcgttgaacagatgcacgttttgcgaaaccagcgccacctggtcgcgcagcgagctcagcttgtactcgcgcaggtcgtggccatccagcaggatctgcccctcgtcgacatcgtagaagcgggtgatcaggctggcaatggtcgatttacccgaccctgagcgccccaccagcgccactgttttcccttccgggatatcgagattgatattgcgcagcgcggccacttcgcgacccgggtaggtaaaggtgacgttctcgaacttgagattgcctttcgcccgctcaatgacccgcgtaccttcgtctttttcctgctcggaatcgaggatcgcaaacagcgtctggcacgccgccatcccgcgctggaactgggcattgacgttggtcagcgacttcagcggacgcatcagcgcaatcatcgaggagaagaccacggtaatggtcccggcggtcagggtgtccatcacgctcgggaagctggcggcatacaggacaaaggccagcgccagggaggcgataagctgaatgatcgggtcggagatagacgaggcggaaaccatcttcatcccctgcagacgcattttattgctgactttatcaaaacgtttggtttccacttcctggccgccaaacatcagcacctctttgtgccctttcagcatctgctcggcgctggtggtgacctgccccatcgtgttctgcatattcttactgatattgcgaaaacgcttggagaccacgcggatcgccaccgacacaatcggcgccagtacgatcaggatcagcgacagctgccagctgtaatagaacatcatcacgaacagaccgataatcgatgccccttcgcggaccacggtgatcagcgcgctggaagaggaggaggcgacctgctcagaatcataggtgatgcgtgacagcagcgttccggtagactgcttgtcaaagaaggccaccggcatacccatcatgtggccgaacaggcgacgacgcatggtcatcaccactttgccggaaacccaggaaatacaatagctcgagatgtagctggtgatcccacgcagcaccatcaggccgataaccaccagcggcatccatagcagcactgagcgatccgttttaccaaaaccatcatccaataacggtttaagaagcgataacatgaaggtgtcactgcccgcgttaagcaccaacgccaccgccgctacgattagcccggctttaaacggcgcgataatcggccaaagtcggcggaaggtctgccacgtggagagatctttatcgttctgcattcaataaaccagcttgtgttgaaatagccgcatattctacccgttatcggcgggcgcgccaaaccactgatgataccaacgcggtaaaacttgatcccgtaagctatggatttgccacccttctgcggaaaaaaccaccgttatctgcccctgctgcggcgtggcgaaccagcgataaccccgctggcggtagcgctgaaccaccttgtacgagggcatccgccacgcattgtagcgcgaagcggaggccagcgcggccgcgccatccacccggcggaccagcagcgcgctggaggaggtattgctgccgtggtggggaacctgaataagtgtagacgtcagatgccgccagtaacggctgatcatcgcctgctccgcctgacgttctatatcgccggtgagcaggatgctggagcgaccatcatcgatccgcaccacacaggaatgattgttaccctttgccgtgctgcccggtagcggccacagggcctggaagttgagtccctgccattgccagcgctcaccgcgatgacacggcagatgatgcgcccagcctaacgggctgcgcacccacgcctgcggccatgcctgcagcactgaatcaaggccgccgcgatgatccagatgttcatggctcagcataatcccttgcagctgcagatggtgccagcgcagccacgggataatcacctgttgaccgctatcaccctgcggccaagccggcccggtatcgtaaagcaatgccttaccgtgacgctcgatcaccatcgccagcccctgtccgacatccagcatcgtcacccgccattcgtccgcaggcggttgtcggctgaatggccgcgtcagtaaaaacagcacgctgagacacagcgccggtgaatgccgccagctctgaaaacgccagcccatcaccaacagccacggcaggatactgatccacagccagcgagcatccagcgtcaaccagccgtccggtaaacgtcgtaatccccaaaacagtagcgccagcacgcgatcggccgccagccagagtagcgactccactatatccggccccgagagatgcaccagcatcgcggtcagaataagcggcaccgccaacagggtgactaacggtaccgccagcaaattagccgccatcgacgtcaggctgactccatggaatagcaacaactgcagcggcagcagcagcagcgtcacgccagcctgcaaatgaacaagagcaattatggtcttccacggccagcgccagcggccggcaggcaacgggagccactggaaccagaagatcagccccgccacggcgaaggcagatagccacaggctttgcgacagcaccgccagcgggtcggcaaccagtatcgctcccagacagcagagccacacctgccacgccgtccagcgttgacccgacaaacgtaaagcacaacagaccgcaagccctaagcaagtgcgcagggccggcggctgcataccggtcagccaggcatagccgacggcgcccgccagcccggcgacaaggggcaaccgccagccaatccagcggcccgggagaatatactgcacgccgcgcagcaacagcatgataagagaagccgcgagagcgatatgcagacccgagatagccatcagatgggaagtgcccgtgttctgcatcaggacctttatctccgtcggcagagacagccgctcccccattcctaatcccaacatcaccgcgcgccagggataagtctgcagtcgccgggtcagcgacgtcagatagcgggcgcgcagactgcagcgggcatccatcgcggaagcggcgacgatccctccgctcagcggtcggtgctgcgccagcgcatagcgctggctgtcgaagcccccgtcattgagctgcccgtgcaccgggcgcaggcgcagcgtcatcagccagtgttgacccgcacaggctggcgcaggtgcaagttccccgtacagcgttacgcctaccgggggaaacagatagcggccccgcaggcgcaccatttgtccacggtgcaaggtctggccatccgtctcgctaaggatcacttccgcttgccggatggcgccggtaaggtgccgggtcggccacagcgcctgatgcgcgctcaatactccccagaccaccagcagaagcgtcatcgccactccggcgacggcccttccatgcagacgaatcagcgccagcgccagtgcgctcgcgcccgccagactgtacgggcccggcaagacgggtagccagagaagcggcagcattgcaatgatggcgcatccggcaagccatggtagacgcataaacacctccctgtgagtggacagtgttacgcaaagcggtgctggcgtcctggcggcgaattcaggcttgcgcggcgcattccagacaatcgcctcgcttgcagccgggcacgctttttttgtgaggatggccgtaaatggcgggcacaaaaaaagcacccgaaggtgctttctttatcgtcaggcaggctgcacgtcgtgcaactcacccttcataaatattggcgcggtcacgtaattctttcccgggcttaaagtgcggaacgtacttaccttccagttcgactttatcaccagttttcgggttacgtccggtgcgaggtgctcgatagtgcagagaaaagctgccgaaaccgcggatttcaatgcgctcaccttgagcaagcgttgaggccatatgttccagcatttctttaacagcatcttccaccgctttcgccggaatgtgagattgctggctggcaagtctttcaatcaattctgacttggtcattattcctccggtttccttcaaggcaaaaattagctaacagcttaaacaagggcggccgtagccgccctttgtgcttgattacaggacgaatcctgcaatctgtcaagtaaactcgtcgctattcaggttgttattacctgaatgacaaagattactcgcctttcgctgctttgaacgcttcagccatagcgttgttggagaagttcgcgtcttcctgcttgttcacggtagcgatagcgtctttttcttccgcttcgtctttcgcacgtacagacaggctcactacgcggttcttacgatccacgccagtgaatttcgcttcaacttcgtcgccaacgctcagaaccagagttgcgtcttcaacgcggtcacgggatgcttcagaagcacgcaggtaaccttctacgccgtcagccagttctacggttgcgcctttagcgtcaactgcagtcactttaccaacaacgatagcgcctttcttgttcagagcaacgtagttgttgaacggatcttccgcgagctgtttaacgcccagggagatacgctcacgctctgcgtcaacctgcagaacaactgctgcgatttcgtcgccttttttgtattcacgaactgcttcttcgcctgcaacgttccaggagatgtcagacaggtgaaccaggccgtcgatgccgccgtccaggccgatgaagataccgaagtcagtgatagacttgattttaccttcaacacggtcgcccttgttgtgggtttccgcgaactgctgccatgggttagatttgcactgcttcagacccagggagatacgacgacgctcttcgtcgatatccagaaccattacttccacaacgtcgccaacgttaacaactttggacgggtggatgtttttgttggtccaatccatttcggaaacgtgaaccaggccttcaacgccctcttcgatttcaacgaagcagccgtagtcggtcaggttggtcacgcgaccggtcagtttggtaccttccggataacgtttagcgatagctacccacggatcttcgcccagctgtttcaggcccagggatacacgggtacgctcgcggtcgaacttcagcactttaacagtgatttcgtcgccaacgtttacgatttcgctcggatgcttaacgcgtttccaggccatatcggtgatgtgcagcaggccgtcaacgccgcccagatcaacgaatgcaccgtagtcagtgaggttcttaacgatacctttgacttccatgccttcctgcaggttttccagcagctgatcgcgctctgcgctgttttcggattcgataacggcacgacgagaaacaacaacgttgttacgcttctggtccagcttgatgactttgaactcaagctctttgccttccaggtgcagcgtgtcgcgcaccggacgaacgtctaccagggaacccggcaggaacgcacgaataccgttcagctcaacagtgaagccacctttaactttgccgttgataacaccggtaacagtttcagcgtcttcgtaagctttttccagcgtgatccaagcttcgtgacgtttagctttctcacgggacagcagagtttcaccgaagccgtcttctactgcatccagagcaacgtcaacttcgtcaccaacctggatttccagctcgccctgggcgtttttgaactgctcagccgggatggcggactcagatttcagaccggcgtcaaccagtactacgtctttgtcgatagcaacaacaacaccacgaacgatggaacccgggcgggtttcgatttcttttaaggattcttcaaacagttgagcaaaagattcagtcatgtttaatcttcaggttaatattaacgtccacctggctccgtgccggatggggttgtttcacatacccgctgaccatccattgccgcggggtactgctataattcggaggcttcggcgcgttaccggttaaggcctacgcaacggccaatttttcgcgcgcatattgtagcgctttttcaatcacttgctcaatgtttagttcggttgaatcgagaactaatgcatcggcagccgggacaagcggcgccaccgcgcgatttcggtcgcgatcgtcacgctcttttatctcggacaaaagacgttcaaagttaacatcaaagcccttttcctgcaactgccgcatgcggcgatgcgcccgctcatcggccgaggcatcgaggaaaattttcaccggcgcgtccgggaaaactaccgttcccatatcgcgaccgtcggcgataagccccggcagttcgcggaaggcgcgctggcggcgcagcagcgcttcgcgaacgcgcggaaaagccgccactttcgaggccgcgttcgcgacctcctgagtgcgaatttcgctactgacatcttccccttccagcaccacttccaggttgccgtcagtagaaataaaacgcacgtcaagatgggcagccaggggcaccagcgcctcttcggactccacgtcgacatgatgatgcagcgccgccagcgccagaacgcggtagatcgcgcctgaatctaacagatgccagcccagcgcttccgccattgccttgcacaacgtacctttacccgcaccgccaggcccatcaatggtgattaccggaatattcgccgtcatctttttctccttcagcaaggcgcatggaatataaacgccgcgcattatacgcatcaatacgccggaaagtgagcattgcttgtaaattacggactacaggaaatgaaaagcagaagttttgcgcaattatagcgggctgacaggacatcagcccgcgggatgacaaagttttactcaggcgagggtactgatccgcgccagctgctcaaagtagtcagggaacgttttggccgtacatttgggatcaaggatggtcaccggcgtatcagacagcgctaccagcgagaagcacatcgccatccggtggtcgttataggtgccgatttctgcgtacttcaactttgccggcggggtgatgcggatataatcttccccctcttccacctcggcgcccactttacgcagctcggtcgccatggcgaacagacggtccgtctccttgacccgccagttgtagatattgcgcagggtagtggtcccttgcgcgaacagcgcggcggtggcgatggtcatcgcggcgtccgggatatggttcatatccatatcgaccgccttgagctcgccgtgggtgcaggcgatgaaatcgtcgccccaggtgacggtggcgcccattttctccagtacgtcggcgaaacgaatgtcgccctgtacgctgttgcggccgataccggtgacttttaccgtgccgcccttaatggcgccagcggcgaggaaatacgaggccgaggaagcatcgccttccaccaggtaatctcccggcgactgatactgctgcttgccgcgcaccacaaatcgctgataagactgattgtccacctcaacgccgaaggttttcatcaggtgcagcgtaatgtcgatatagggtttcgacaccagatcgcccttaatgacgatgacggtatcctgcggcgccagcggcgcggtcatcagcagcgcggtcaggaactggctggagacgctgccgtcaacctcgacgttgccgccctgaaaaccgccgcgcaggcgcagcggtggataattttcctgctccagatagtcgatctgagcgccgccctgacgcagggcatccaccagatggccgatcggacgctctttcatccgcggttcgccggtcagcacgatatcgttgctgccaaggcacagggccgccgccagcggacgcatcgcggtaccggcgttgccaaggaacagctccagcgccgcggcagagcgcaacgggccgccgttgccggtcacttcgcagcgggtgcggtcggcagacagggtatattgaacccccagcgcactcagggcattcagcatatggcgcacatcgtcgctgtccagcaggttggtcagcaccgtcgtgccgcgggccagggcagccagcaacagcgcgcggttggagacgcttttcgaacctggcaggttcacggtgccctctacgcgtgcgatgggttgtaacgtcagggattccatcaaacttcactctcaaacaaacagaataaaaaccccgcagacaggccgcggggaggaagaaagaaacaggcgattaaccgtggcggcgttcgaagtccagcataaagtcggttaacgccttcacgccgtccagcggcatggcgttgtagatggaagcacgcatgccgcccaccacccggtggcccttcagcgcgtgcagcccggcagcaaacgactcttcgaggaacagtttgtccagggcgctgtccgccagctggaacggtacgttcatacgcgaacggttggcctgcgccacatcgttacgatagaagccgctgttatcgatcacgccatagagcagttcggctttctgctggttgattttatccatcgcggcaaccccgccctgctgcttcagccacttaaacaccagtccagccagataccatgcgaacgtc

SEQ ID NO: 5323 - DNA, 67858 bp, Unknown
  gut microbiota DNA sequence
gcactgggttaatccggaagatggccattttgtggcgcagcagaaagtggacagctccggcttcctgaccgacccggtggttgccgatggtcgactgctgatccaggcgaaagacggtacgctgtacgcgattacgcgttaattaccgctgtcgtgagtgattaagaaacggcccctggcagacaggggccgttttgacttttttaaaaacgtcgttaagacgatgttgcttagtgattgtatgaggcatttaacatgatacctgtggtcgcgcttgtcgggcgccctaacgttggaaaatccacgctctttaaccgcctgacgcgcactcgtgatgcgctggttgcggatttcccggggctgactcgtgaccgtaagtacggtcgggccgaagtcgaaggccgcgaattcatctgtatcgataccggtggtattgatggtacggaagagggcgtggaaacccggatggcggagcagtcgctgctggcaatcgaagaggccgatgtggtgttgtttatggtcgatgcgcgcgcgggcctgatgccggcggacatcgcgatcgctaaactcctgcgctctcgtgaaaagcccaccttcctggtggctaacaaaaccgacggcatcgacgtcgaccaggcaatggcggacttctggtcgctcggcttgggcgatatctatccgattgccgcttcgcacggccgcggcgtgaccagcctgctggagcaggccctgctgccatgggtcgatgaggttaatccgcaggaagaagtggatgaagacgccgaatactgggcgaaattcgaagccgagcagaatggcgaagcggaagaagagccggaagacgacttcaatccgcaggatctgccgatcaagctggcgattgtcgggcgtcctaatgtcggtaaatcaaccctcaccaaccgcatcctcggtgaagatcgcgtggtggtttacgatatgccgggcaccacccgtgacagcatttatatcccgatgcagcgtgacgagcgcgaatacgtgctcatcgataccgccggggtgcgcaagcgcgggaaaatcaccgacgtcgtggaaaagttctcggtgataaaaacgctgcaggcgattgaagacgccaacgtcgtgctgctggtgatcgatgctcgcgaagggatctccgaccaggacctctcgctgctgggctttattcttaacagtggccgttcgctggtgatcgtcgttaacaagtgggatggcctgagtcaggaagtgaaggagcaggtgaaggagaccctcgactatcgtctgggctttatcgactttgcccgggtgcacttcatctccgccctgcacggcagcggcgtcggcaacctgtttgaatcggtacgcgaagcctacgacagcgctacgcgccgcgtaagcaccgcgatgctgacccggatcatgaacatggcggcggaagatcatcagccaccgctggtgcgtggccgtcgcgtgaagctgaaatacgcccacgccgggggctacaacccgcctatcgtggtgatccacggtaaccaggtcaaggatctgccggattcctacaagcgctacctgatgaactacttccgtaaatccctggacgtgatgggcacgccaatccggatccagttcaaggaaggggaaaacccgttcgctaacaagcgtaacaccctgacgccgaaccagatgcgtaaacgtaagcgcttgatcaagcacatcaagaaaagcaaataatcattaaacccgcttcggcgggttttttgtggccgccatgccggtaaatgtcaaaaccttccgccataatcccgagatacttcgccgggaacagagcggctcaaaggtggacttactatgcagattggttttatcggcctcggcgcggtggtggaaaccgcctatttaccggcgctgcgtcgcctgggggacgtcatcgaccgctgccagggctatgacctggactgcagcagagcgctgccggggatccagcgctgtagttcgctgtcggcgctgctggccgaacccctggatacgctcttcattaccacctcatcacttcagcatctgcccgtactggagagggcgttagccagcggcatttcccgcatcgtggtggaaaagccgatcgtggccaaccttgagcaggccgcccggctgcgggcgctgctggcgccgactgagcaggccgcgcgggtgctggctcttgaccactggatggcgcgaggcgttgcgctgaacgctcctggcccgctgtggcgggcggaaggggaggccagcggcctgcctccgccgcacctgtcagcgcaggatatcgtctggatcgaaggttatttgcaggagccaagcggctttaacagcgctggtgagccggtcgcactcaattttgccaccggggagctggatacccggcagctgcgtcaccctgatggggtgatcctcgatatcggcacccatgtcctggcgatgctccgcgaaaccctgcacgccagcggaggcgatacggcgctgagcctttcccttcgggtggcgaaagaccgcctcggccatgacattgctcctggggatacgagcactgccgagggggaggcgcatctgcagggaaccctgggcactatcccgctcaatatctggctcaacaaatatgcgggtcccgcgggcgggcaaaagggaatgcgaataggactgcgggacgggcgaataatcaccctcgatcgcgcccctgagggcgaagtggtgacgctacaggacggcgagcgggtgcagcgctggacccggcccggggcgatctatacgcactgtcttgatgagcagatcctcggcgctgataatctgtttatccgggcgccggacagcgtggccgggctaacgcagcgtaggcttgaggaagtggaatggctgctcaggttgcagcagcaattacgcggcccgcattaaacccggaacatgataaaataggtgcagataaacgttgaaaggaatggttatggaacttgattgccctctgtgccacgcgccgttagatgtcaaaggcagtagcgcgcattgcgcccagtgcgaaagggtatttacccttgaggcccgctgcccggaatgccaccagccgctggaggtgctgaaggcgtgcggcgcggtggattacttttgccagcatgggcatggccttatctcgaaaaaacgggtggaatttattccgctggtttagtgggcgaaggctttctggcccgcgtttttttcaccgtcgcgatctgcttcacttcgctttcgacccagccgtctttcaggcgggtggtgagcagatcgccggttttgacctgttttgtctgcttcagcaccgtaccgtcgctcaccgaggtgacgctgtagccccgcgccagggtggctaaggggctcaccgcctccagatgggtcaccgcgttgccaaaccgttcacgccgctcgctgaggcggccacgcataatttccgccagccggtattccagctgctggatccgcgactgcgcgcggtggatccgcggctgcgggttgtagtgattcagacgcagaacggtgcgcttttgccgctgttctgcgcgcttaagctgtgactccacggcgatacgcatccgctggcgcaggcgttccagggcggtctgctggcgggccaagcgcagctgtggatgctgttgctgcaggcgatggaacagctgggtaaaacggcgctggcgactggcgaggaaatagtccatcgccatttccagccgctgctgtccggactgcagctggcgcagcagctcctgctggttgcggctgacgatttccgcggcggctgagggagtcggtgcccgcaggtcggcaacaaaatcagcgatcgtgacgtcggtttcatggccgacggcgctgacgatagggatctggctggcgaaaatagcccgcgccacccgctcatcgttaaaactccacagatcctccagcgaaccgccgccgcgtccgacaatcagtacgtcacactcctggcgcgcgttggccagcgcgatggcgcgcacaatctgcccgggggcgtcgtcaccctggaccgcggttgggtagatgatcaccggcagcccgggatcgcggcgcctgaggacatggagaatatcgtgcagcgcggcaccggttttcgaggtgatgacgccgacgcagtgggcgggagaggggagcgcctgcttatgtttttgctcgaaaagtccttccgccgttaactgtgctttcagctgctcatacttctgctgcagcaacccttcgccggcgggctgcatgctttcgacgataatctggtagtcgccgcgcggctcatacagcgtaatgttggcgcgaaccagcacctgctgcccgtgctgcgggcgaaacgtcacccggcggttgctgttgcggaacatcgcgcagcgcacctgggcgttatcgtcttttaaggtgaagtaccagtggccggaagaaggctggctgaagttagagatctcgccgctgatccaaacctggcccatttcgcgctcaagcagcagacgcaccgtctgattgaggcggcttacggtaaaaattgcgggggattgagagggtaacatgtgagcaagatcaaactttaaatcagcaggttattcagtcgatagtaacgcgctcagaggggatggcaagtattatttgcaaaaaagggtagatgcaatcggttacgctctgtataatgccacggcaatatttatccaccctggtcgagatattgcccatgctacgtatcgctaaagaagccctgacgtttgacgacgtcctcctcgttcccgctcattctaccgttctgccgaatactgccgatctcagcactcagctgacgaaaaccattcgtctgaatattcctatgctctccgcagccatggataccgtaacggaagcgcgtctggctattgccctggcacaggaaggcggcatcggctttattcacaaaaacatgtccatcgagcgccaggcggaagaagttcgtcgcgtgaagaaacatgagtccggcgtggtcaccgacccgcagaccgttctgccaaccaccaccctgcgtgaagtgaaagagctgaccgagcgcaacggtttcgccggctacccggtggttaccgaagaaaacgagctggttggcatcatcaccggccgcgacgtgcgtttcgtcaccgatctgaaccagccggtcagcgtctacatgacgccgaaagagcgtctggtcaccgttcgtgaaggcgaaagccgtgaagtggtcttcgctaagatgcacgaaaaacgcgttgagaaagcgctggtcgtggatgagagcttccacctgcgcggcatgatcaccgtcaaagacttccagaaagcagaacgtaaaccgaacgcctgtaaagatgagcagggccgtctgcgcgtaggcgcggcggtcggcgctggtgccggcaacgaagagcgcgtagacgcgttggtagcggcaggcgttgacgttctgctgatcgactcctcgcacggtcactcagaaggcgttctgcagcgtatccgtgaaacgcgcgcgaaatatcctgacctgcagatcatcggcggcaacgttgccactggcgcaggcgcacgcgcgctggcggaagccggctgcagcgcggtgaaagtgggcatcggcccgggctccatctgtactacccgtatcgtcaccggcgtgggtgtgccgcagatcactgctgtttccgacgcggtggaagcgctggaagggaccggtattccggttatcgctgacggcggtatccgtttctccggcgatatcgccaaagcgatcgccgccggtgcggcggcggtgatggttggctccatgctggcgggtaccgaagagtccccgggtgaaatcgagctctatcagggtcgctcttacaaatcctaccgcgggatgggctcccttggcgcgatgtccaaaggctcctctgatcgctatttccagagcgataacgccgctgacaaactggtgccggaaggtatcgaaggccgcgtggcctataaaggccgcctgaaagagatcattcaccagcagatgggcggtctgcgttcctgtatgggtctgaccggctgtggtaccattgacctgctgcgtaccaaagctgaattcgtacgcatcagcggtgcgggcattcaggaaagccacgttcacgacgtgaccatcaccaaagagtccccgaactaccgtctgggctcctgatttcttcgcccgaccttgcgtcgggcgatttatttactctgtttcacttgcctcggaattagcgtcaatgacggaaaacattcataaacatcgcatcctcatcctcgacttcgggtctcagtatactcagctggtggcgcgtcgcgtgcgtgagctgggcgtctactgtgagctgtgggcatgggatgtcacggaagcacagatccgcgaatttaatccaagcggcatcattctttccggcggcccggaaagcaccaccgaagagaacagcccgcgcgcgccgcagtatgtgttcgaagccggcgtgccggtatttggcgtctgctacggcatgcagaccatggcgatgcagctgggcggccatgtagaaggttctaacgagcgtgagtttggttacgcacaggttgaagtggttaacgacagcgcgctggtgcgcggtatcgaagattccctgaccgcagacggcaaaccgctgctggacgtgtggatgagccacggcgacaaagtgaccgccatcccagcggacttcgtaaccgtcgccagcaccgacaactgcccgttcgccattatggccaacgaagaaaaacgcttctacggcgtgcagttccacccggaagtgacccacacccgtcaggggatgcgtatgctggagcgcttcgtgcgcgacatctgccagtgcgaagcgctgtggaccccggcgaaaatcattgacgacgccgttgagcgtatccgtcagcaggttggcgacgacaaagtgatcctcggcctctccggcggtgtggactcttcggtgaccgcgatgctgctgcaccgcgctatcggcaaaaacctgacctgcgtattcgtggacaacggtctgctgcgcctgaacgaagcgcagcaggtgatggagatgttcggcgaccactttggcctgaacattgttcacgttgaaggcgagcagcgtttcctcgacgcgctggcgggtgaaagcgatccggaagcgaagcgtaaaattatcggtcgcgttttcgtggaagtgttcgacgaagaagcgctgaagctggacgacgtcaaatggctggcgcagggtaccatctaccctgacgttatcgagtctgccgcttccgccaccggtaaagcgcacgtcatcaaatctcaccacaacgtgggcggcctgccgaaagagatgaagatgggcctggttgagccgctgcgtgagctgttcaaagacgaagtgcgtaagatcggcctggaactgggcctgccgtacgacatgctctaccgtcacccgttcccgggccccggccttggcgtgcgcgtgctgggcgaagtgaagaaagagtactgcgacctgctgcgtcgtgcggacgctatcttcatcgaagagctgcacaaagctgacctgtataacaaagtcagccaggcgttcaccgtgttcctgccggttcgttccgtcggcgtgatgggcgatggccgtaaatacgactgggtggtttccctgcgtgcggtggaaaccatcgacttcatgaccgcgcactgggcgcacctgccgtacgatttcctcggccgcgtctccaaccgtatcatcaatgaagtgaacggtatctcccgcgtggtgtatgacatcagcggcaagccgccagcaacgattgagtgggagtaatccccggcgttagctgaatgaaacgaaaccctctgtgtttacagagggtttttttatagctgctacattaaggtctcccacctgacggcaagcgctaatcgcgcatatattgatgcatctgggccgccgacatgtcccactggcttccttcaaacgggggcatatagctgccatcatcttcgccaatctcagcggcagtgagctgattgagtttatcgttcattgtcattaacagatcccggtatttctctggctcccgggcgaggttatgattttcttcggggtcgttaaccagatcgaaaagttcaacatcattattctccagcagctcggccagggtagcaggaatatgatgctgcttgagcgaaaagtagcgggcaaatttatagtgtccatcgttgatcatacggatccctgagcgatgggaaaaatcaggatggagtgacgcgatcgcttttttaaattgatcgtgcgggagtttttctccagccagctttctgaattttgccgtgtattgcgcatccatatacaggatcatgccgtaacaataaagcgaacccggacgcagcgcatttaagcccgcttgctcaggatgcgccagtaatgggctcatatcccggccttttctgccctccaggactttctctcgcagcgagcgatcgcgtccagtcagaccaatcagggtcggtactaaatccagatgattagtcaaactgttgcagcggatgtttcccggatacgccggatggcgaatgatcatcggcacatggatctgctctttgtacaccgaggaacctttaccatgcatctggtgggagcctccgagttccccatggtcggcggtaaagacgataatcgtattttgcgtcagctgcaggttatccagctcattgagaatcgcctcaagatgctggtcattatcgcgaatacagttgaaataataatccagtaatttgcgccagcgccggtcttcatcggggaactgtccctccatcaccgccctggcattctggtactctttatgggcggcaggtctgccaggctcatcgagcggctggtggcggtttgcaggcagcggatagtctggccagctttgctgatagatttggttgtgcgggggttgggttggcagcagggtgtggttttctttatccattggccctttccactgcacctgctcaccatgctcatcggtgtcgataaacatgacatcgtgggggttaaccaggtttactgccgcgaaccagggcttattttcatcattcagcgggcggccggtgttacgtagccaactaatggtctgccccgtggtgactgaatcaaagaaatagccgcccttacttttcccgatgacatcgccaatgccgtgataatcagagaaaccatacttttccataatttcatgcagtcgcggcgtcgggatctcgcccaggtccatttcttctaccgatttaccagcgaccggctgatcgatctcccgggtaagatgccatttacctttatacgccgtgtaataacccagttcacgcatcatatggcccacggtacgtaattccgggtccagatcgtaattcatccaggggaagccaagattatcaaacatccgggtgtgcggcatatggagcccggtgtacatgacagagcgcgatggcgtacaaacgttggccgtgttctgatgattggtaaaagtgatacccgttttcatcaggcgttcccggcccggcaccggaaagggataccgctcgaaataacgttcctgatcgcaggttattagtaaaatattgtagccttcgggcagtgtgtcagggatttcgccggtgaaaggaatatcccatgccgctttcggggcggcattattttgcgcggcgtttcccgtctctggtaacaggctcacgacagcggcaatccccagacctttgaggagatggcggcgatttccatctattttatttggttctttcatcttcagactccgttaattgtaatatattttgccgaatctccgggataagactcataatgagcgcgggcggctggcaatttaataaaagccttcgcatgacgttcatatagggcgtgatatggccgaaaaaggctaaatagccgctgcacaggtaattctgtgcttcgtcgtcatggatggtaaaacggtgtttagggcatcccccatggcaggcaaagcgccagtggcagctctgacagcgggcagagagttggcccttttgcttcccgaactgttgctgaaatggcgagctcgccatcgctgccatagcatcttgcttcagattacccagtttatattccgctgagacaaagtgatcgcagctgtagacatcgccgttttgctccaccagtaaactctgcccacagacaggctgcatggtgcagagcgtggcgggctggccggcccatacgccgagcagattatcaaagtactggataaacaccctgccaacatcgttttccagccagtcgtcgaaaacactgcacaaaaatttgccccagccctcaggggtaactgaccagggagcaggggagtcaacgagaggaataaactggagatggtgaaggtttagctcgcggctcaggcagcgatagagacttttcccctggcttgcagactggcggctgaccaccaccatggcatttaccggaacgtcatgctgctgcaggcagcgtatggcctgcacaactttttcccaggtgggttttccgcagcccgtcgtacgccaggtgtcgtggagtgacgcagggccatcaatggataatccgaccagaaatccatgacgacgcaaaaaacgagcccatttatcgttcagcaagatgccgttggtttgcaggctgttggcgatgattttgttaccacggtaacgctgctggagctcgaccacctttgcaaaaaaatccagcccgcataaggtaggctcaccgccctgccagcaaaactcgacgttttgcgagggggtcgatgaaatggtgttgtgaatgtacgcttccagcgtgaggtcgtccatggtggcataccctggacgcggaacctcgttttccagataaaagcaataccgacaggccagattgcatcgattgccgccgggttttgctacggtattaaaattagcgctcattctttgctatgctcgaacgttttcgatgaggaagagagtaaagctaattgtgttaccggaggtgtggctaatgttaccgatggcgactggctttattttttggatcattatgcaagcgaaaaatacaggcggtatcgttatttttcgcaggtgacagcatgccctgctattctcttaaaaatttcattattgatttggtgaatgtattttcattaaaaatttatagtatgaataatgcctgccatatggctataagcgcaggcgtaaattatcaagggcgtagtgatccacgtttactcttcagcaaggttgtttttggctatcggttggtcaacggccgctgccggatattctacattacgttcatcctgcgccttacccgcctcgcgcaccatcgccagcgccagtccggcaacgatcaacgttaacccggtggacacccacattccgccgataatgcccagccggtggttcagccatgcgtaggcaaagggtgaaacagctgccatcagttgcccggggatcagcaggagacccgtgcggctggcgtagctttctgcgctaaacagcgccagcggcagcgtcgctttgacaatcgtcaccagcccgttaatcgcgccatagcccagcacaaacccggctgcgcatccggcaaaggtcgtgctgctcaatccaaggagaaaacagagcggcatggcgagcgcagtaaaacgcgttagcgtgagtgaggtgacccggggaccggccagcacttcccccagccgggcgccggtctggccgaatccccacagcataccgacggcaaccggcagaccaaagtggctgataaactccggcagatgggtagaggtaccgttagagatgaaggtgatcagcgcaataaagatcgcgtaacgcgccccgttacgccggtcgccctctgctgtcgctggcgaggctggtgatttcgccgctgaactgagccgctggcgaggcagttgataactcagccatgcgctcagcaggccaaacagcgcatagatccgcagggcattctgccagggcatgatggttaataacgcctcgcccagcggccagaagagggcagaggccagaccgccagcgagagtgatatgagagatagttttccgcgcctgctgaccgtacagattcaccactgcggcgaacagcgcatcatacagtgagagccgcatgccgatgccggtcagcagccaggcgccgtaccagccggccagcgaagggcgccaggccatcatggcgcagctggcggctatcagtaaggtaccgctggtgaccaccagtcttccgccaaagcgagccagcagcctggcaacgaacggggagacagcggccatcatcagcatcgcaagcgtcaggccgagatagatctgcggcaaggaccatcctttgtcggcggcgatagccccggcaaaggtgccgggcatataaaaagagatcccccagttgatgagttgctgaccgcccgcggtgaaggcaaggcgtcggggaatagcgtttatttccatggtttttcattccgttaagacagttgtcctgagcatacccggcaggctattgttctggcagagcggccaccttatgcgcggtataagagaaacttttatgacaacactgaacctgggaaatctggcgaccttccggctggtcgtacagcgcggcagcttttctgccgccgccgacgcgctggggatctcccaacctgccgtcagcctgcaggtacgtcagctggagcagtttttacagaccaggctgctggagcgaaccggacgtgggatcaaggcgacggcggcaggaatggcattgctggcccacagcgagcagatcgatcgggcggtgaatagcgcggtgcagtcggtcagcgcattcagtcaggaggttaatggatcgttgacgctggggacaggcgcgacggcctgcattcatcttcttccaccgctgctgcagcatcttcgtcagcagcacccgctgctgacggtgggggtgaccaccggcaacacgctggatatcgtccgcgcggtggaagaaaaccggctcgatctcgggctggtcacgctgcccgtgcaggggcgcagtctggcggtgactgcgatgttagatgaggagttcgtgaccatctatgccagccgcgagacggagatgccggcggtttatactcccgccgagctgcaggcgcagccgctcattgccttcgaggcgggtagcggcacgcgggatctgattgaccgctggttccgctcggcgggactggcggtgacgccggtaatgcagttggggagcatcgaggcgattaagcgcatggtgcgggcagggctgggctacagcatcgtgccccgcatggcggtggagcgggtggaggatcgcgacggattacgcgtacactcgctggcgccgcggctataccgacagctggcggtagtcatgcgtcaggacaaaattgtgacaaaaggtatcgctgaaatgctgcgcctgctgcataccgtgcgcttataaatcgccgacggcaaaattaccgcatcaaagacagtacttcagcagcgagcggctctgcctgcggagtgtggcgcttgcagtattagaatcaaaggattactcgcggggggagggctcgacggtgagcgatgactcctgcgacgcttttttatcctgatgatggtaccaggcgccgatggaggagtagacaaagcgtccaaagaagaagagaaagctgataagcagtacgatacgggtcatgcgacggttaaatcgatgtcgtttacgcatactgggtgcctgactcacaaaaggatccttgaagtatacccgaagatgggcgatgggggtattaaggcacaggaacgagatggggtcaattgatgcagatgtaaaagtgcggcagtgaaaacattaattaatgttatataagataatcgtcgtatttacatgctcactttattagccgtgaaatgtcgggaaaaataagatttattaatgttggcgtcagcatttgttgatttatatcaatagtctccttctcttggccactaaaatcagcggacgttaccgtgtcgttattatttacgcggtcagcatgggtggttggatgcctgcctgaatatgcctcgcgggagcagaggcactctgtagagcacctatgaatttattaaaatactatcaacaatatcgcgacaagtggtgggctttaccgctcgttctgcctgcgctgttattaccggtcgccagatgggcgaatacctacaccatgctcaatggtcatatggtatttttgtattatcttcccctggcgctggtgctcagcctgatgatgttttttggctgggcggcgatccctggcattattattggcctgctgttaactctggcccacggcatgatgtttgagcagtccatcggtgtactgttccatttccttatcccctgcgtgctctgctggggcggctaccgcatttttgtcccccagcgtcagcaggtctcacacggcaacgtccgactgatgccgcatcgtctgttctggcaaatgctgctcccctcggtcatttttctgattttgtcacagattgccgaatatcttggactccatccgcgcacaacggaaatgaccggcgttacgccatttagtttacgttcattaatcacctttcaggcgctaatggtagggtgcctgaccggcatgccgctgtgttattttgtgttacgggtcattcgtaatccttttcatttacgcggctttatttctcaggttcgcttacaaattgatccaaaaataaaaaaaattgaaattatttgctgggcgacggtattaattctgctactgtggctattattgatgccgcttaatgatagcagcaccatatttagtacgaattatacgttgtcattgctgatgccggtgatgctctggggtgccatgcgttttggctatcgctttatctcactgatctggacgccggtgctgattgccgtgatccattttcattaccgttacttaccaatttacccaagctataacacccagttggcgatcacgtcatcaagctatctggtattctcgtttattgtcgcctatacggcgatgctggcgacacagcagcggctgatctacgctcgcgtccggcagatggccttcctcgacccggtggttcatatgccgaacttgcgggcgctgagccgggcgctcaacggcacgagctggtcgacgctctgttttctgcgcattcctgagcttgaattgctggggcgccactatggggtacttttgcgaatccagtataagcaaatgctggcgaaccacctgagaacgctgctgcagcccaacgaagcggtatatcatcttgccggtcacgatttagtgttccgtctcaatagcgaagggcaccaggcgcgcattcacttaattgaccgctccctgcgacagttccgtttccactgggacggggtccccctgcagccgcggatcggcatgagctattgcaacgttcgctcgccggtcaagcatctgtatttactgcttggcgagttgaacaccattgccgacatgtcgttagccagcggccatccggaaaatttacagcgccgcggcgcgggccatgttcagcaggatctgaaagataaagtcgtgatgatgaaccgcattctcaaagcgctggaacatgaccattttgtcctgatggcgcagcctatccagggcattcgcggcgatcgctatcatgaagtgctggtgaggatggaaggggagtcgggtgagctaacggggccaaacgagttcttgccggtggcgcacgagtttgggctgtccacgcgggtggaccagtgggttattgagcatacgctggcctttatggacgccaaccggcgggcgctgcctggtctgcggctggcgatcaatctttctccggtgtcgctgagccgcagccagtttcctcaggaggtcgaagcgctgctgcaggcctacaacattgagccatggcagattattttcgagctgaccgagaactacgcgctcagcaatcccgagctggtctgccagactttagaacatctgcgggcgctgggctgccgggtggcgatcgatgattttggtaccggctacgccagctacgcccggttaaaaacaatgaacgtcgacattcttaaaatcgacggcagttttattcgcaatctgcttgccagcagtcttgattaccaggtcgtggactctatttgtcgtctggcgcgtatgaagaacatgcaggtggtggccgaatatgtggagtcgccggaaatacgtcaggcggtcatcacgctggggatcgattatatgcagggctatgatatcggggtaccggtacctctgacgcagttggcggaggagatgaccggctgagcagcaaaaagccgggcgtaagcgcccggctcggttgatagccagagatacgatcaggcgtctggctcttcttcagcaatcttcagcatccattccggcacgccttcccagtactgttgctctttttccagatccagcagcaccagcgcattctggctaaaccagttgtgcggaaacgtcagcgtccagtggtgagcttccgtctgcaggcgcagcgtcggcggcgtagtggtagcctgacgctgattattcagcagtacgcccaggcgcagtagctgaattagcggcagaaactgctttttcctgaatagcgtaaagcgcggcagatcgtcgagcttgatcgctttgcgatgatagcgtacgagggtggccatcagcatctgctgctcctgattgaagcccggcaggtcgctattttggagaatgtaggccgagtgacgatgcatgccgctgtggttgatattcagccctacctcatggagcatcaccgcccatttcaacagcgccgcgaggtgcggattggccagcttgggattctgctcctgccactgctccagcatctgggtggtagtttccagtacccggcgtgcctgttcgcgatcgatgttgtactgatttgccagactctgtgccgtgcggctacgaatatcctggtggcggaagcggccttccatctcgtacaggacaccttcgcgcagcgcgccatcggacagacgaagttctttgatggccagcgcgtcaaacacaccgcagaggatcgccagcccaggcgcaaagaccgctttacggtcttctgagagaccgggcagactgagcgcgtcgaagtttttatgcttcaacagctcatttaccagcatctcgaggcgctccggcgtaataaatccgtccttctcgcccatcgccaccagcacttcctgggcggctttaatggtgccggaggcgcccagcgccacggtccatccctgaatacggaactgccaggccagcgtctccagcttctgcaccgccgccaggcgcgcgcgctggaagttttctttattgataacgccgccagggaaataggcctgcgagaagctcacgcagcccatgcggcggctttccaccaggcggggctcaaaatcttcgccaatgaccagctcggttgaaccaccgccgatatcaatcaccagcttgcggccgcgctccggctgcgtgtgctcaacgcccataaaaatcaggcgcgcttcttcattaccggagatgatctcgatcgggtaggggatcactttttccgcgcgtttaagaaactccgccgcgttggtcgcctgacgcagcgtatgcgtcccgacgatacagacgctggagggggagaacccctgcaggcgttcggcaaacagcgacaggcagttcagcccacgggtcatggcttcttcgctcaacaccgagttttcatcgaggccatcggccagatgtacgcgctgtttcaggcgtccgatgatctgcatggcgccgtcgacgacacgggcgatcaccatatgaaaactgttcgaaccaaggtcaaccgcagcgaactcctgcggccgaggggtgttatcgtttattggcataggttagtcgggttgttcgagtgatttgagataatcgtaaatcgccatttgcgcgcgcactttacggcgattgccgcgcggcacatagcggttactcagttctttatcaagatagcgcgcttttaccgtatcgttgaacaggatatcaaaaatatccagcacccgctgcttcagacgcggatcgagcagcggagcggcaacttcgatgcgataatcgatgttacgcgtcatccagtcggcagaggagagccagacctgtttatcgccaccgttttcaaaacagtagacccggtcgtgctcgaggaaacggtccacaatactgatgacgcggatattttcgctgataccttccagacccgggatcagcgagcacatgccgcggatcagcagattaaccggcacgccggagctggaggcggcatacagtcggtccaccagacctttatccaccaggttgttcagcttcagcgtaatcccggacggttgcccgttttgcgcattggcgatctcgcgatcgatcatctcatacagcagacgacgcgagttctgcggcgacaccaacaggtagtcgaagctaaccggacgataggggttctcgataaagttaaacacccggcggacttcattggtaatgcgcgcatcggcggttaacagcgaatagtcggtgtagatccgcgccgtcttctcgttaaagttaccggtgccgatgtgggcgtagcgcaccacctcatcgccttctttacgcgagataaggaacagcttggcgtggatcttcagacctggcgcagagaagataacgtggactccggcttccgtcaggcgtttcgcccagtgaatgttagcctcttcatcgaagcgcgcctgcagctccaccactacggtgactttcttaccgttgtgggcggcgtggatcatcgcgtcaataatgcgcgaatccttggccacgcggtaaatgttgattttgatcgccaatacgctggggtcgaaggaggcctgacgcagcagctccagcacgtgctcaaaggtgtgatagggatagtagagcagcacgtcgcgttcgcgaatggcgtcgaagccgttgcggaatttatcaaaccacagatgacgcaggcgcggcataggcttattgaccagattggccttacccacattcgggaagccgataaagtctttaaagttgtggtagcggccgcccggcagcatcgagtcgtagttggagatggagagcttatcgcgcagcatttcgaccatcgcatccggcatatcgcgctggtagacgaagcgaaccggctcggcggtcaggcgctgcttgaggctggaggacatcagctccatcaggctcgactccatctcatgcaccagatcgtactcggcgtcacgggtcatcttcatcgagtaggcgttcagcgcatcgtaatcaaagaagcctttaaaaatatcgtccaggcaatagcgcaggatgttatccaggaggatcattggcttgcggcgacgcggcgcttccggcggcaggttcacgaagcgcggcactttatccgacggtatttccagcagagcatagttgatgttttccccgcggataatctccaccgccagataggtgtaatcatctttcaggaactgcacgaggtccgtttcgcggttgatcaggatcggcgagatatgctggcgtaaatactgcttgaagtagttgcgcagccaggcctgctgattgacggacagctggcgctcgttgatcaggaagatctggttacgcgccatctccagcaacagttcattatacagactatcgaattcctgatcggccttcagaacgcgggcctgaattttgcctaacaggtggcgagaatgggcggtactgccttgttcttcactgataataatccggcgcttcagctcagcgaagcgcactttgtaaaactcatccaggttgttggagtaaatccctaagaagcgcatgcgctcaatcagcgggttactcttgtccgccgcttcctgcagcacgcgttcgttaaaagacaaccagctgagttctttttcgatgtatagcttttcctggcccattaccgctcacactccgttttactcacaggacgtagactattatgacgaatttttctgcgtagcgatttactgtgtcacaacaatatgacagtaagaagaattatttctgtgagatgtttgattagtaaacacttttaattaaaaaaaagccccgcgatgtgctcatgcggggctggttgttcattcgtcggcggcatagccctgcgggggaagctgtcgctcatccagccaggcgtggttgcctgccatgcgcagacgtccatcgacgaaccagctgatgaccagcggataaatggcatgttcctgggcctgaacccgcgccgtgatttcctcctcgctgtcgccaacgaagaccggcaccttggcctgcaggataaccggcccaccgtccagctcatcggtgacgaagtgcaccgaggtaccgtgctcctcgtcaccgttctccagcacctgacgatgagtatgcaggccaggatacttcggcagtagcgagggatggatgttcagcagacgtccctgatagtggctgacgaacgccgggctaaggatacgcatatagcctgccagcaccaccagatccggggcgtaggcgtcgatttcatgcatcagctgacgatcgaacgcttcccggtcggcaaactgactttgcgccagcgcatgggccgggatgccggccaggcgcgcgcgctcaaggccgaacgcatcagccttgttactgaataccgcacgcagggtgccgtttatctgtttccggccgcaggcgtcgatgatcgcctgcaaattgctgccgctaccggaaatcagcaccacgatgtttttcatgcaatgaccacacgctgttcggaatcggaggctttgatatacccgattttccacgcgttttcacctttgtcattcagcagggcaatcgctttgtccgcttccgctgccggcagggcgataatcatccctacgccgcagttaaaggtacggtacatttcatgctggctgacgttaccggcggtttgcagccagttgaagacggatggccactgccaggaggactcatcgatgatcgcctgggtgttatccggcagcacgcgcggaatgttttcccagaagccgccgccggtcaggtgggcaatagcgtggacgtcaacgctggcgatcagatcaagcaccgatttcacatagatgcgggttggcgccagcagatggtcggccagcggtttaccgtcaaggtcggtagtttgtgggtcaacgccgctaacctcaatgatcttacgcaccagcgaatagccgttagagtgcgggccgctggacgccagcgccaccagcacgtcgccatcggtcactttgctgccgtcgatgatttctgatttttccactaccccgacgcagaaacccgccacgtcgtaatcttcgccgtggtacatcccgggcatctctgcggtttcaccaccgaccagcgcgcaaccggactgcaggcagccttcggcgatgccgttgatgacgctggctgcggtatcgacgtccagtttaccggtggcgtaataatccaggaaaaacagcggctcagcgccctgaaccaccaggtcgttcacgcacatggcgaccaggtcgataccgatggtgtcgtgacgcttcagatccattgccagacgcagcttggtaccgacgccgtcggtgccggagaccagtaccggctcgcggtatttctgcggcagtgcgcacagcgcgccgaatccgcccagtccccccatcacttccgggcgacgggttttcttcaccacgcccttaatacggtcgacgagagcgttgcctgcatcaatatccacgccggcatctttatagctgagagaggttttatcggtcactgcgaagtctccacgcgtttgcggtaagcaagaaaaatcggcgcaattctaacagggaaagcaaacgtttgcgagcctgctttacagttggcgtaaaaccgctgatgaatggttaaatttgatactgctcacgaaaatgaaaccgggtacagtctggtgcttgcctctacgtaaaggaatcctcattatacgactgaaaccggtttccgtgttggtttgccacgcattttgtcggtgattgacgcgggtcaggagagggatgaatgaagattgcggcatttgatatcggtggcaccgcgttaaagatgggcgtgatggcccgcgacggcaggctgctggaaaccgccaggcagtcaatcaatgacagcgatggcgatcggatcttacaggcaatgctgtcgtggctggcggcccatccgtcgtgtgaaggaatagccatcagcgcgccgggctatatcgatccgcacagcggtcttatcaccatgggcggcgctatccgtcgatttgataacttcgccatgaaatcgtggctcgagacgcgaaccgggctgccggtctcggtggaaaacgacgccaactgtgtgctgctggccgagcgctggcagggcaaagcggcggagatggccaattttctggtgctcactatcggtactggcatcggtggggcgattttctgccaacaccagctgatcaacggggcgcgttttcgtgccggcgaattcggctatatgcttaccgaccgtcccggcggacgcgatcctcgtcgctattcaatgaatgagaactgcactctgcgggtgctgcgccatcgctatgcgcaacatattggcgcgccgctggatagcgtgacaggcgaactgattttcgaccgctatgacgccggcgacccggtttgtcagcgtctggtcgccgagttcttcaatggcctgggccatggcctttataacctcgtccatatcttcgatccgcagaccatttttatcggtggcggcgttgtggaacgcccaggatttctgacgctactgcgccagcatctggcctggttcggcattgccgactatctcgataccgtcagtcacggtaacgatgccggcctgattggtgcggtttaccattttaatcagctgtatcgttcgccagacgacgatcgacattagggagagactatgtccggatttaaagcaggttttctgtggggcggcgcggtcgcagcgcatcagttagagggcggctggcaggagggcggcaaggggatcagcgtggcggatgtgatgaccgccggcgcccacggcgtgccgcgggaaattaccgacggcgtggtggccgggaaaaactacccgaaccatgaggcgatcgatttttatcatcgttatccacaggacctggcgctgtttgccgagatgggcttcaaatgttttcgcacctcgattgcctggacgcgtattttcccgcagggcgatgagctggagcccaacgaggctggcctgcagttttatgatgatctgttcgacgaatgcctgaaacacggcattgagccagtcattacgctgtcgcattttgaaatgccttatcacctggtcaccgagtacggcggctggcgcaaccgcaagctaatcgactttttcgtgcgctttgccagggtcgtcttcacccgctatcaacataaagtgaagtactggatgacctttaacgagatcaacaaccaggccaacttccatgaggactttgcccccttcaccaactccggtttgaaatatttgccggatgaagaccgggaaccggtgatgtaccaggccgcgcactatgagctggtggccagcgccctggcggtgaaagcggcgcgcgagatcaacccggcgctgcagattggctgcatgatcgctatgtgccccatctatccgctgacctgcgccccggacgatatgatgatggcgatgaacgccatgcaccgccgttactggtttaccgacgtccacgtgcgcggtcgctatccgcagcatctgctcaactattttgcccgccgcggctttactctggatatcaccgaagccgatcgtcaggcgttaaccgagggctgtgtcgactacattggctttagctactatatgtcgttcgctaccaaagccaccgaagacaaccccttgcttgattatgatgaaaccaccagcctggtctccaacccgtacgtcaaaaagtcggactggggctggcagattgacccggtcggcctgcgctattcgctgaactggttctgggatcactaccagctgccgctgtttattgtcgaaaacggctttggcgcgattgatgtccgcgaagcggacggcagcgtcaatgaccagtatcgtatcgattatctctccgcccatatcgcggagatgaaaaaggcggtggtcgaggatggcgtcgatctgatgggctacaccccctggggctgtatcgatctggtttccgccggcacgggggaaatgaaaaaacgctacggctttatttatgtcgataaagataatgaaggcaatggcacgttggcacgcagccggaaaaagtcctttgcctggtatcagcaggtaattgccagcaacggggagaagctgtcgtagtcgggtggcgctaacgcttaaccgacctacaatacacgtaggcccgcgtaagcgtatggactgcaccccgcacccaagccggagcctcgcctccggtttttttgtctctaaatcactttgcttgatatacgtcaagcaagatgggtatggcacaatccgcaaaaagcggtataatcccgcgattttttttgtggctgcccctcagaggagaaagagaatgaagattgtggaagtcaaacacccactcgtcaaacacaagctgggcctgatgcgcgagcacgacatcagcaccaaacgcttccgtgaactcgcctcagaagtgggcagcttactgacttatgaagccaccgccgatctggagactgagaaagtcactattgaaggctggaacggtccggtggaagtcgagcagatcaagggcaagaaaattaccgttgtgcctatcctgcgcgctggcctcggcatgatggaaggggtgctggagcacgtgccaagcgcgcgtatcagcgtagtcggtatctatcgcaatgaagaaaccctcgagccggtgccttacttccagaaactggtgtctaacatcgatgaacgtatggcgctggtcgttgacccgatgctggccaccggtgggtcgatgatcgccactatcgatctgctgaaaaacgccggctgcaccagcatcaaggtgctggtgctggtggcggcaccggaagggattgccgcgctggagaaagcccacccggacgttgagctgtacaccgcctctgtcgataagggactgaacgagcacgggtatatcattcccggtctcggcgatgccggcgacaagatttttggaacgaaataaaatataccgcgaaaaaagccgactttgagagtcggcttttttttgaataaaagtaatccacagcaaataacagacgactctcagaggaatacactatgacgcgccgtgccatcggggtgagtgaaagaccgccgcttttacagacaatcccgcttagtttgcaacatctgttcgccatgtttggcgcaacggtactggtgcctattctgttccacattaacccggccaccgtcctgctgttcaacggcatcggtacgctgttgtacctctttatctgtaaaggcaaaattcccgcttatctgggatcaagcttcgcttttatctccccggtgctgctgctgttgccgctgggctacgaagtggcgctgggcggctttattatgtgcggcgtgctgttctgcctcgtctcctttattgtcaaaaaagccggtaccggctggctggatgtgatgttcccgccggcggcgatgggcgccatcgtggcggttatcggcctcgaactggcgggcgtggcggctaatatggccgggctgctgccggccgacggccagtcaccggacagtaaaaccattattatctcgatggtgaccctggcggtgacggtgttcggatccgtgctgttccgcggcttcctggcgattattccgatcctgatcggcgtgctggtgggctatgcgctgtcgtttgtgatgggcgtggtcgataccaccccgatcgccgaggcgcactggttcgcgctgccgactttctacactccgcgctttgagtggtttgctatcttcaccatactgcccgccgcgctggtggtgattgccgagcacgtggggcatctggtggtgaccgccaatatcgttaagcgcgatctgatccgcgacccgggcctgcatcgttcgatgtttgccaacggcctgtcgacgatcgtttccggcttcttcggttcgacgcccaacactacctacggtgaaaatatcggcgtgatggcgattacccgggtctacagcacctgggtaatcggcggcgcggcgatcattgcgattctgctctcctgcgtcggcaaactggcggcggctatccagatcatcccggtgccggtgatgggcggcgtttccctgctgctgtacggggtgatcggcgcctcggggatccgcgtactgattgaatcgaaggtggattacagtaaagcgcagaatctgatcctcacctccgtgatcctgatcatcggcgttagcggcgctaaagtgcacattggcgccgccgagctgaaagggatggcgctggcgactatcgtgggcatcgccctcagcctgattttcaagcttatcagcgtcctgcgtccggaagaggtggtcctcgacgcggcggatagcgaagagtttaaataacgatcgcctgaccgggcggcgatcccgcccggttctctcctgacctaaatctgtggtaaactcttcgcgtttttctgtaagcctatgttgaggtccatctgaacgcaccggcacagctctctttgccactgtatcttcctgacgacgaaaccttcgcgagtttctggccgggtgataatccttccctacttgccgccctccagaacgtactgcgccaggaacacagcgggtacatttatatctggtcacgtgaaggggcaggtcgtagccacctgttacacgccgcctgcgcggagctttcccagcgcggggatgcggtaggctacgtgccgctggataaacggacgtggtttgtgcccgaggtgctggaggggatggaacagctggcgctggtgtgcatcgataacatcgagtgcgtcgccggcgatgagccctgggagatggccatctttaatctctataaccggatcctggaatcaggcaaaacccggctgctgatcaccggcgatcggccgccgcggcagctgaatcttggcctgccggatctggcctcacggctggactgggggcagatctataagctgcagccgctgtcggatgaagacaaactgcaggcgctgcagctgcgcgccagactgcgcggcttcgagatgcctgaagatgtgtgccgcttcctgctgaagcggctggatcgcgagatgcgttcgctgtttatgaccctcgatcagctggatcatgcctcgattaccgctcagcgcaagctgacgatccccttcgtgaaagagatccttaagctttagtccgccaggggagtcagctcctgctccgtcagcccggtcaaccgggcgaccaggtcgcgcggaaggccgctgtgcagcatagcgacagcgatgcgctgcgcctcttctttccgtccttcctgacggccttgcgccaggccccgctccagcccctgttgttccagatattccgcaatcgtcatcaacgtctccttatgctgcggcgtacgtaacgccagctcgcgaatgaatttaatcggctcgcgcgtgttgcctgcctgtaccagatagtgcatcagggcttgtacctgcgattccgtcgccagtccagtcaataataattcgctcagcttgtcgaggagctgcgccagatcgcgttgtcgaatatgtttttgcagtaactccagcgttgccatgcgctggtgggtggcaatctcgtcatccggaatgacggttatgtccgccagcggaaacgccccgtgataaaggtggccggccagctccggagcgacgaattcatcgagccagcgcagagagaacggataggggctcaccagaccgtggtagaagagaacagggatcaccagcggcaggcgatcgtggccggcatcgagatggcgctgcatggcggcgatggcgtagcgcatcagacgaaaggccatatgccggtcgggcgtgctctggtgttcgataagcgcataaatataaccgtcgcccgccgtggttttcagggaatacaaaatgtcggcgtaaaagggacgcagatcgtcttcgacaaaatgcccggactcgagatgcagtgtacgcagatcgcacactttaagcagcgtctcgggcagatacagctgcaggaaatcacgggcggtatcgggatgggagaggtaggtcttaaacacggcgtcatggggcgtggaggtcggctttttcatgttcatccgtccagtggattgagcgatggatgaacagtagcaccgtccggcgggcgggagatattggcgtgaaagatctggaatcgcccacgtaaaaaaagcgccgcgcaagcgcggcgcgggtgagttagcttacgatctcaagaacctgttccggcgggcggccaatacgcgcctggccgcggctgacgacgatagggcgctcgatgagtttcggattgtcgaccatcgcctgtatcagcgccgcgttgctgagagccgggtcggccagattgagcgatttatacagatcctctttctggcgcatgagctcgcgggggctctccatacccagcagctgcagcagctggcgcagcgtcccggcatccggtggcgtctcaagataaagcaccacctcaggatcgatgccgcggctctgcagcaggctcagcgtttcgcggctcttggagcagcgtgggttatggtaaatttttaccgcgtcggtcatggggtctccttacattttttgatagggacggaagcgagcctgcagatcgcgtagctgatcgatacgggcatcgtaacgtgcctgctgcaggctaccgagtttcacctgcgagctggcgctgctgagcagggaaatcgcctgctccagctggccgaccagcgccatgctttcagcccgcgccgccagctcctgatcgcgattgcccagcgcgccttccgcctgggccagcaggtcccagccgttgccatcctctttataggtaaaggtataccggttcagaatggtcgccgcttccccgggctgcccgccctgcagcagggcgttggccaggttcagctgcagcaccggattagtacgcagctcgcgggcgtttttaaggcgattgatggcgtcgctggttttcttctgtccgaggtcgatatcggtggccagatcgagataccaggcattttgcgggtcggcgttgagcagcggctgcagcgttttgcgtgcctggtcaaagttattgctttccatcgccagcagagcgcgaccatactgggcggcatgctgttggcggatattgcctttatcccaggcgttcagcagatcggtgcccagcttgttgtcgccgttggtgtacatcccgagggtacgcgccttcgccagatagaagtccgccgaggactgtaccaccaccgggcgcatctggttggcgcggttacgggcatcggccagtcggctttccggcagggggtgggtgagcaacatttccggcggtcgcgtcgagtagcgcgactcgtcaagcagtttacccataaacatcggcatagcctgcgggtcgaaacccgagcgctgcagaacctgaatgccaatccggtcggcttcttcttcgttctggcgggtgaagctgatcataccctgctgagtaccggccagcgtcccggtcagggccgccattccggcctgcgggctggccatcgccagcaaaattgaacccagcgcgccgacccaggtcagcggcgcgttgcgcttctgatcttccatcgcgcgggcgagatgccgctgcgtcacgtgggagatttcgtgcgccatgacagaggccagttcgctctcgttatcagagtagcggaacagggcggagtggaggaccacattgccgccgaagaaggcgaaggcgttgatctggtcgttattaatcaaatagaagtggaacggggtacgcaccgagttggcgtgagccaccagacgcatacccagcccgttgatatattgcaccagcagagggtcgttgatcagcggcgcgctaccgcgcagttggcggacgtagtaatcccccatctgcatttcctgaccgattgacagcgtgcttcctgcggaggttcccatgtccggcagggtatctgcggagtcagcaaaagcaggacctatcgaacccagcgtcagcgacgcgatcgcggtcgccaccagcgttttcttcaactgcctgaacataacctctgtcctgtaatgtgggtgtgccagtttgaccgattgtgcggcgtaatgttccctggccgcatcccagcgagtttagctggcgttggccgccttgaaaatatgttcttcatggcggagaacggtttgactgcggcgcatcaaaaagcgaagtcttttttgtgacatttcgatacaattccccggattgtcgccgcttggcccttcagggaaggttttatgcttgagatgttaatgcagtggtaccgccgtcgattcagcgaccctgaggcgatagcgctgctggttattttgcttgccggtttcggcattatgttctttttcagcggcctgctggccccgttgctggtggctatcgtgctggcctatctgctggagtggccgaccgttcgtctggagcgcatcggtctgtcgcgcacctgggccacctcgctggtgctgatcctctttgtgggcatcctgctgttgctggcctttgtggtgctgccggtagcctggcagcaagggatctacctcatccgcgatatgccgggcatgctaaataagctctctgatttcgccgccacgctgccgcggcgctatccggcgttaatggatgccggcattatcgatgcgatggcggaaaatatgcgcacccggatgctgacggtgggcgactcggtggttaagtactctctggcctcgctggtggggttactcaccctggcggtctatctggtgctggtgccgctgatggtcttcttcctgctgaaggataaagagcagatgctcaacgcggtgcgccgcgttctgccgcgcaatcgcgggcttgccgggcaggtgtggaaagagatgaaccagcagatcaccaactacattcgcggcaaggtgctggagatgattgtcgtcagcgtcgccacctggataggctttattctctttggcctcaactactcgttgctgctggcggtgctggtgggcttctcggtgctgatcccctatatcggcgcgtttgtggtgaccattccggtggtgggggtggcgctgtttcagtttggcgctggcaccgagttctggagcctgtttgcggtctatctgattattcaggggctggacggtaacctgctggttccggtgctattctcggaagcggtcaatttacacccgctggtaattatcctgtcggtggtgatctttggcggactgtggggattctggggcgtcttcttcgccattccgctggccacgctgattaaagcagtggtgcatgcctggccggatggtttggcggtcgacgactaaggcaatgagaataaaaaaagacgccgggcgagggcttcctctcccggcgtcttgctttgcatcaggcgttttctttcagccagttcagcaccacgtcgtggtgattgctggttttaaaatcatcaaagacgtgttcgattttgccatcggcatcaatgaggaaactaatccggtggatcccgtcgtaggttttccccataaaggatttttcgccccagacgccaaactgctcgcaaacctgatggttttcatcagacagcagcgtaaagttcagcagctctttttcggcgaaacgggagagtttttccggtttatcagtgctgatgcccagcacttcaacgccggcttttttcaggtcgtccatattatcgcgcaagccgcacgcctggacggtgcagcccggggtcatggctttcgggtaaaaataaaccaggacacgttgtccctggaagtcggttaaatttacttcctcgccgtcctggtccggtaagctaaatttcggtgcgatatcaccggctttcagtggggtcatgggttaaactccatcctgttcatcatgctgtgaataattaacgatgttaatactgccttgtgcgttcagttctgtacatagggctttgaacgcttgttcgatatttgctgcattttgcgtcgcaggactgtgggcagttatctggataaaaagctgcgcggaatcgccgtctcccggctgcgtgcgggacaccagctccgcaatattcatattccatgtatcgcacagggcagtaaagcgctcgatgatatgcggtgagtccggcacctcaacctggacccaaacggtgtttggcatggcctgcggcgggcgcgcagtggtgcgtttcatcacgatcaacagctccagctccgcgcctttcagcggcagagttgattcgatcaggttaatcgcattccacgacccggaaagcagcatgataaacgtaaactcatcaccgagcatggccagccggctgtcttcgatattacaaccgcagctgctgacgtggcgagtgatcgtattcacgatgccgggacggtcagcccccagggcggtaataaccagatagtgttgtaatgaggctgtcaaacctgttcttcctttaaaaaggtgaggtaacattaggaaagcataaaaaaaaccgccatacaacatccctgatggcgtcgggtctcttgcttttattacagctccaaacgtaacattgagaatcttgtcgcacttctgctctgaggatggcccatgttcacgggaagtattgtagcgcttgtcacgccgatggatgaaaacggtaatgtctgccggacaagcctgaaaaaactgattgattaccatgtcgccaacggaacctcggcgatcgtttcggtagggactaccggtgaatccgcaacgctgagccatgaagagcatggcgacgtggtgatgatgacgctggagctggccgacgggcgtattccggttatcgctggaacgggagccaatgcaaccgcagaggcgattagcctgaccaaacgttttaacgatagcggtgttgttggctgcctgacggtcactccttattataaccgtccgacccaggaaggcctgttccagcactttaaagctatcgccgaacatactgacctgccgcaaattctgtataatgtgccgtcccgtaccggttgcgatatgttgccggaaaccgttggccgtctggcggaaattaaaaatattgtcggtattaaggaagcaacagggaacttaagtcgcgttcaccagatcaaagagctggtttcagacgactttattctgctgagcggtgacgatgcgaccggtatggacttcatgcagctcggcggcgtaggcgtgatttctgtcacggccaacgtggcggcgcgcgaaatggccgacatgtgccgtctggcgctggcgggtcaatttgccgaagctcgtgcgattaaccagcgtctgatgccactgcatacaaaattatttgtcgaacccaatcctatcccggtgaaatggggatgcaaggcgttgggtcttgtggcgaccgatacgctgcgcttgccgatgacgcctatcaccgatcatggtcgtgaagccgtcactgccgcgctgaagcatgccggtttgctgtaaagtttagggagatttgatggcttactcagtacagaagtcgcgcctggcgaaggttgcgggtgtttcgctggttctactcctcgcggcctgtagttctgactcgcgctataagcgtcaggtgagcggtgatgaggcctatttacaggcatcaccgttgagcgaacttcatgcgccggcggggatgatcctgccgattcaggtgggtgattacaatattccggtggctaacagcaccggcgcggtcggtaaagcgctggacattcgtccgccggcgcagccgctggcgctggtgagcggtgcgcggacccagtttaacggcgataccgcgacgctgatggtcgagaacggccgcagcggttcgctgtgggcacaggtcaccagtattcttcagtcgaagaactacgttatcgccaagcgcgatgatgcgagccagacgctgaacaccgactgggttgagtggaaccgtcttgatgaagatcagcagtatcgcggtcgttatcaaatctccgtcaaaccgcagggttatcagcaagcggtggtcgttaagctggtgaatctggagcaggcgggtaaaccggttgccgatccggcgtctctgcagcgctacagcaccgctatgctgaacgtcatttcggaaggccttgacatgaatgccaccagcgcccagaacgccgcccagcgcagcgcgggggccaccttcgacgtgcagagcgccgccgacgataccggcctgccgatgctcgtagttcgcgcgccgtttaacctggtgtggcagcgtctgcctggcgccctcgagaaagtggggatgaaagtgaccgacagcacgcgctctcagggcagcatggcgctgacctataagccgctgtctgacagcagctggcaggagctgggcgcacgtgacccgcagctggtctccggcgactacaaactgcaggtcggcgacctcgataaccgcagtagcctgcagtttatcgacccgaaaggccacaccctgacgcagtcgcaaaatgacgccctggtagccgtattccaggccgcatttaacaagtaatcaaaagggctggagcaatccggcccttttaatatatagtgacgcaaacgtgtgcgtggccatataatcctgtaaatcgccgcgttaaggctgctccagtcgcctgactgcagttcgccccgcaagcgtacagcatccgctccaacgcccgttgcaggatgttatgtaagaccgacacgtcattttttggctcaatatcactggagtagtgaaagatgaaaaagcaagctgagttgtatcgtggtaaggcgaagacagtatacagcaccgataatccggacctgctggtactggaattccgtaacgatacgtcagcaggtgatggcgcgcgcatcgagcagttcgatcgtaaaggcatggtgaacaacaaattcaaccatttcattatgagtaaactggcagaagcgggcatccctacccagatggaagcgctgctctccgataccgaatgtctggtgaaaaaactggatatggtgccggtagagtgcgtggtgcgtaaccgtgcggcaggctcgctggtaaaacgtttaggcattgaagaaggtatcgagctgaatccgccgctgttcgacctgttcctgaaaaacgatgctatgcacgatccgatggtcaacgactcctactgcgaaaccttcggctgggtgagtaaagagaatctggcgcggatgcgcgagctgacctacaaagccaacgacgtgctgaaaaaactgttcgatgacgccggtctgattctggtggactttaagctggagtttggtctgttcaaaggcgaagtggtgctgggcgacgagttttcgccggacggcagccgcctgtgggataaaaacaccctcgataaaatggacaaagaccgcttccgccagagccttggcggcctgatcgaagcctacgaagaagtggctcaccgcctgggcgttaagctcgactaacccgcccgccgccagaagatggcctcatcttctggcgtctcttgctgtttcctgtggtaatcctgcgctgaaccgcctacgatctctgctattgatacataacagggaatgaggtgcttatgcgctggcaagggcgtcgcgaaagcgacaatgttgaagatcgacgtggacaatcaggctcgccgtttggcggcggcgggggcggcggcttccgtctgccgagcgggaagggcggcattgtactgctgattattgtgctggtggcgggctactacggcgtggatttgaccggcatgttgaccggcgaaccgatgccgcagcagcagacctccacgcagcgctccatcagtccgaaagacgatgaagcggcgaagtttacttccgtcattctggctaccaccgaagatacctgggggccgatctttgaaaagatgggccgccagtacccgcagccaaagctggtgctctaccgcggcgcgacccgtaccggctgcggcaccggtcagtcggtgatgggccccttctattgtcctgccgacagtacggtctatattgacctgtcattctacgatgagatgaaaaataaactgggcgccgacggcgactttgcccaggggtacgtcattgctcatgaagtgggtcatcacgtacaaaaactgctgggcattgagccgaaggtccgccagcaacagcagcatgccacgcaggccgaagccaaccgcctgtcggttaagatggagctgcaggcagactgcttcgccggcgtctggggtcataatatgcagcagcaggatattctggaaactggcgatctgcaggaggcgctgaacgccgccgaggccatcggcgacgatcgtctacagcagcagagccagggacgcgtggtgccggacagttttacccacggcacctcgaaacagcgctacacctggttcaaacgcggtttcgatagcggcgatccggcgcagtgcaataccttcggcagcgcgctgtaatcgtcccccatgatggacgcgctgcttaacctcaccgcgcaaatggcgcgggaggggatccgtcgcctgctggtgctcagcggcgatgagagctggacgctgcagcaggcgcaggcgctacgggagaggctcggcggcgatggcctgtgggttggccccgagccgggttctgcgccctgcgtggcgcccggcgcgctgaaaacgctgctggggcgggaagtgatgcacgcctttttcgatgcccggcgcgggtttgatgtggccgccatggcggccctgagcggcacgctgcgggcgggaagctggctggtgctgctgacgccccccttcgccgactggccgacccgggcggatgaggactctctgcgctggagcgatacgcctgaccctatcgttacccctaactttgttcaccgctgctgtcggcagtttatcgccgatccggaggtgttgctctggcggcagtcggaccggccacgtttcccgctggccgccccgcgtccagactggcatcccgccgatggccgcccgcaggccgagcaggcggcaatccttgagcaactgatacgcctgccgcccggtatcgcggcggtgacggcggagcgtggacgggggaagtccgcgctggcgggcatgctcttgcgccagcttgggggcgaggccatcgtcaccgccccaacgcgtagcgctgtcgaggtgctggccagctttgccggggagacgttgcgctttatggcgcccgatgcgctgctggcgtcgaaagaaaaggcggcgtggctgatagtcgatgaggccgcggctatcccggctccgcttctccggcagctggtgagccgttttccccgcacgctactcaccacgacggtgcaagggtacgagggcaccggtcgcgggttcctgctgaaattttgcgccagtctgccccatctgcaatcgttcaccctgagcgccccgatccgctgggcggcgggctgtccgctggagtcagccatcagtcagttgcttatctttaacgatgaggcatttcgcgacgcgccgatgggggagatagccctggaggcggtcaatcagtcctgctggcaaacgcagccagcgctaccggaggcgatgtaccagctattgtccggggcgcattaccgaacttccccgctcgatctgcggcgcatgatggatgctccgggccaggctttccgctgcgctcgcgccggcggcgcggtggcgggcgccctgtggctggtggccgaggggggactttctcccgaacttagccgggcggtatgggcgggttttcgccggccgcgcgggaatctggtcgcccagtcgctggcggcgcacggcggcagtcccctggcggcgacgctgcgcgggctgcgggtcagtcggatcgctgtccatcccacccgccagcgggaaggcctcgggcggaagatgatcgccgatatcgccgccgatgccgctggctatgactatctctccgtcagcttcggctataccgctgagctgtggcgcttctggcaacgctgcgggtttaccctcgtacggctgggtacccatcgcgaggccagcagcggctgctatacggcgatggccctctatccgttgaccgcggcagggcgccagctggcgcagcgggaggcgcagcggctgcagcgcgatgaatactggcttcgcccgtggcgagaggaatccgcgccgctgccggccgtcgcagacgctatgcttagtgatgaggactggctggaagcggcgagctttgccttcgcccaccgcccgctggctgcggcgctgggctgcctcaaccgcctgctgatgcaggccgacatgccgttgccggccctgcggggacgactgcagggcaaagaggaggccgcactctgcgccgtgctgcagctgacggggcgaaaagccttgcaggcgagatggcgtcgggaggccgctgacgccttgcgctcccttgatgcagcgcgcgctgatgcgctgcgtcagcaggtggcgcatctgcaatttttttaactaactcattcagttaaatggcatggtcatatctggcgagcggcgtacactgcccgcaaacactaaggagacagccatgaaacacgatcattttattgttcaaagtcctgcgacgcctgcgcaacagctgttgctgctgtttcatggcgtaggggataacccggtctccatggggcaaatcggcagctggttcgcaccgcagtttcctgatgcgctgatcgtcagcattggcggggtggaaccttgcggccccaacggtcggcagtggttttcgctgcagggggtgacggaagagaatcgtcagcagcgcatcgacgccattatgccgacctttattgaaattgtacgctactggcaggaaaagagcggcgtcagtccactggccaccgcgctgatcggtttctctcagggggcgattatgtcgctggagagtatcaaagcggcgccggatctggcttcgcgggtcatcgcctttaatggccgctatgcgacgctgccggagacggcaacgacggccactaccattcacctgatccacgggggtgaagatcgggttatcgacctggcgtgggcggtgtcggccgaggaggcgttacagcaggcgggcggcgacgtgaccttagatattgtcgacgatctcgggcatgccattgacgatcgcagtatgcagttggcgatcgagcgtctgcgttataccgtgccgaagcactattttgatgaggcgctgagcggcagtacgccaaaaggggatgatatcatcgaaatgctgtaaccccggagagcggggttacaggcgggcggtaccgcgataaaggcaaacttacggtttcttcgactggtcgtgcttcggccagtcgtcgtcatcgtcccatttatcgttaaaatcacggtgcggcggcagatcgggtttgttgttgaggaattttttgtggtcaacgcgattcagatctttaatcacgttgataattacccccaccaaaaagaccagcaccagaatccaccagtgtttaataagccattccatgcgcgcttcctctttacgtcaattcgtcaggcgaccagctgttccatgacgcgttgatacatccgcgccagcagctgcaggtcggcggcgttcacacattcattaattttgtgaatcgttgcatttacggggcccagctcaaccacctgcgcccccatgcgcgcgataaaccgtccgtctgaggtgccgccgttggttaacagctgcggtttgatctcattatagtgctcaatcgcgttgacgaccgcatccaccagcttgccccgtccggtgaggaacggctggccggagagccaccactccacgctgtaacgcagctggtatttttccagcagggcgatcacccgggatttgatcatctcgtccgtcagctccgtactgaagcggaagttgaactggacgaacatatcgccggggatcacgttattgctgccggtgccggactgcacgttggcgatctgcatgctggtcggcgggaagaactcattgcctttatcccactcgatattgaccagttccgccagcatcggcgccgcgcggtggacagggttatcggcaaggtgcggataggcgacatggccctgcacgccgtgaatagtcaggttgcaggtcagcgagccgcggcggccgtttttcaccacatcgccgaccacttcggtactggaaggttcgccgaccagacaatagtccagacgctcgttacgcgccatcagcgtctccaccactttgacggtgccgtttttggcgctggcctcttcatcagaggtgatcaaaaacgccagtcggcccctgtggttcgggtactgcgcgacaaaacgctctgcggcaaccaccatcgccgccagcgagcctttcatatccgccgctccgcggccaaacagcatcccgtcgcggatggtcggttcgaacgggggattgatccagcggtcggcgtcgcctgccgggactacgtcggtgtggccggcgaaggccagcgtctcgccgtggccgcgccaggcccagaaattctgcgtatcgccgaaatccatcggttcaacggtaaagccgatcgcacgcaggcgttcaatcattaacgcctggcatcccgcatcatcggggctaagggaagggcggcgaataagctgctgagccagctcaatgaccgggcaagacatagactatacctcgttaaactgctgataacttgcttcactaaaacccagcagcataggacgaccgggcgcgcagagcaatgggcgtttgataattgccggcatttccagcatcaatgcggcagcggcgtcggcattatcgatgctattgcgcagcgactcgtcgagtttgcgccaggtggtgccacgggtgttcagcagcgcctgccagcccagctcggcaataaaggtatccagttgcgcgcgctcaaggccatcggcgcggtaatcatggaagcgatactcaatctgatgcgcttccagccagcggcgggcttttttaatggtatcgcagtttttaattccgtacatggtgagcatagataaaccttttacattcaattaagcggttaactcagatatttccgaatatataagtcttactgaaataatacgtgattcagatgaataaatataactttttaccggggatctcattcgatatatcgggtggttaaatgttggccacctgtgggcatgatgtgagggctttaacattattgcaaaaatgttgtctgaggttgctctacgtcacattatgtttacatacgaagcggcatagtagcgacaaccagaggttttatctctgtcagcggtccataagacaatcagagcaataggggagcacaacttcccatcggtaatgaagttatatagaatcgaccataataataagagaggctattatgattgaacatgaactggggaactggaaagactttattgaaggcatgcttcgtaaataaatttccgcaatgtgagcaggggaataacgcgaagtaaataagcgcgctagggttctgaacacataaagaaggcgaccaccgtggtcgccttttctgttattacgcctcgccgccgaagctcgtcggtttattgcggacgctcctttagcggaaaacggcgacgcaccagcacaaagaacagcggcacgaaaaagatcgccagcacggtggcggagatcatcccgcccatcactccggtgccgaccgcatgctggctgccggaaccggcgccggtgctggtcgccatcggcagcacgccgaagatgaacgccagcgaggtcatcaggatggggcgcaggcgctgacggcaagccgacagcgtggcgctgagcagatcctggcccttctcgttgagctcattggcgaactcgacgatcagaatggcgtttttcgccgacaggccgatcaccgtcaacagacccacctggaagtacacgtcattctccagcccgcgcatccaggtcgccagcagggcgccaatcacccccagcggcaccaccagcatcaccgagaacggcactgaccagctctcgtacagcgccgccaggcacaggaacaccaccagcagagaaatcgcgtacagggccggcgcctgagcgccagagaggcgttcctggtaggacatggcggtccattcgaggccaaagccggtgggtaactgcgcggccagcttctccatcatgtccatcgcggtaccggtactgatacccggcgccgcctcaccgacgatctccaccgctgagtagccattgtagcgctccagccgcggcgagccggtctcccagcgcgaggtggcgaaggccgagaatggcaccatcgtgccgctgctgttgcgcacgtaccaaagattgatatcgtcaggcagcatccggtatttcgccgccgcctggacgtagactttctttacccggccgcgatccataaagtcgttgacgtagctcgacccccacgcggtttgcagcgtatcgttgatgtcgtcaatggagacgcccagcgcctgcgctttacgctgatcgatatcgacctgcagctgcggactgtcatcgagcccgttatgccggacgcgggtcaacagcggatttttcccggccagctcaagtagcgtatcgcgcgccgccatcagcgcatcgtgccccttcccggcatgatcctccagctccatatcgaagcctgccgaactgccgaggccgctgatcgccggcgggctgctggcgataacccgcgcttcgttaatctgattaaacgctttggtggcgcgttcaataatggcaaaggaggtgccggtttgcgggtcgcgctggtcccagtctttgagacgaacgaacatgcgggccacgttctgcccattgccgccggggccggagccaacggtagcgaacaccgactcgacgttctgcttctcgttattgaggaagtaatcttccgccttctgcaccaccttcagcgtctgctgctgggtgctgccgctcggcaactggaccgaggtggtgaacatcccgcgatcctccagcggcaggaacgaggtcggcaaatgcagaaacaggaacaccatcccgccgagcaggaggacgtagatcagcatccagcgcagcgagcggtgcagtattttgccgacgaaggtttcgtagcggctggcgctgcggttgaaggtgcggttgaaccagccgaagaagcctgttctttcatgggattcacctggcttaacaggcttaagcagcgtggcgcaaagggcaggggtgaggatcatggccaccagcaccgagaggaccatcgccgcgacgatagtgattgagaactggcgatagatggcgccggtggtgccgccgaagaaggccatcggcacaaataccgccgacagcaccatcgcgatccccaccagcgcgccctgaatttgtcccatcgatttgcgggtcgcctcgcgtggcgacaggccctcctcgctcatgatgcgctcgacgttctccaccaccacgatggcgtcatccaccagcaggccgatcgccaacaccatcgcgaacatcgtcagggtgttgatgctgtagccacaggcatacagcaccgcgaaagtgcccatcagcaccaccggcacggcgatggtcgggatcagggtggcgcggaagttctgcaggaacagatacatcacgaggaagaccagcaggatcgcctccagcagggttttcaccacgtcggtgatggaagccttcacgaaggaggtggtctcgtaggcgaccttatattccagaccgtgggggaaaaactgcgccagctcattgaggcgattgatcacgcgctccgcggtggccatttcgttggcgccggaagccagcttgatcccgaggcctgaggccggctggcggttgtagcggctaagatagtcgtacttctccgcccccatctcgacggtggcgacatcgcccagcgtcacctctgaaccatcctgattgacgcgcagagtgatattgcggaactgctccggggtttgcagcagagattgcgagttgatggtggcgttcagcgcttgcttatcgaccgaaggcgtcccgccaagctggccgacggcaatctgggcgttctgcgaactgatggcgtcggtaacatccttggtggtcatctggtagctgttgagcttcgccgggtcgagccagatgcgcattgagtattgcgaaccgtaggcgtcgatatcccccacgccgttgacgcggctgagcgggtcctggatgttactggcgacgtagtcggcgatatcttgtttatccatactgccgtcagtggagacgaaggcgagcgtcaggatattggtatcaccggtcttgcgcaccgtcaccccctggttttgcaccgcctgcggcagcttacgcatcgccgactgtagctggttctgaacctgctgcacggcttcatccgggtcggtaccggcggtaaagctgagggtgatcgtcgcctggccggtggcgctgctctgggaggacatatacatcaggttatcgaggccggtcatattctgttcgataacctgagtgacggtattctccagggtttgcgcggaagcgccgggatagttggcggtgatccgcacattcggcggggcgaggtcgggatactgttcaaccggcagcgacaaaatggcaagggcgcccgtcaggcataacaggattgccagcacccatgcaaaaatggggcgatcgataaagaaattcgccatcagaataaaaacctcatatgcacattttcttgttattgcacagcctgtgccactttagcgccagcctctccggcaatcgtggagaaattaaggagatagtgtaatttatcatgttgcttttgccgtatcgtaaagaaacctcgagctttcctgccagcaggtagcgagtctgcttcgtcaccgcagaccggcgcattatcccttgccggtgtgaaacctcatttcatttaagtcaaaaaaattgatccaaaacggattctctccagaaaaagttcatcctgggcaattggacattgttccggcgtcatcttgtcgggtaataaataggcatgcgcattgaggggttattcaccaagaagacaaaaggaagccatgaaccactttattttgagcgatagccgaaagtgcatcggctgccaggcctgcgaagtggcctgcgtgatggcgcataacgaggagcaacacgtgctgaccccgcagcgctttttgccacgtatcaccgtgatcaaagcggagggccagcgtaacgccatcacctgccgccactgcgaggacgccccctgcgtccgcagttgtcccaacgacgccatcgcccagtccggcgacagcgttcaggtccgtcaggagaaatgcattggctgtaaatcctgcatggtggcctgcccgttcggggtgatgcaggtggtggtgacgccgcaggccgcaggcctggtgaaagccagcgcgcacaagtgcgatctatgccagggccgcgaggcggggccggcctgtgtggaaaactgtcccgcgcaggcgctgactctcgccgacgatgagacgttgatcaccctggcgaagcagcggcgactgcgctcggcatgccaggaggtgcagccgtggcagcgcgctacgccgctctgcagccagcccaatgctggcgcgaaggtcaggcaaatggcgatgacgcccccgcgcggggagccggataagctggcggcggaggtgcgtaagagccactttgaggagatctatcagccgttcaccccgcagcaggcgcagcagcaggccgcccgctgtctcacgtgtggggagcacagtatttgcgaatggacctgcccgctgcataaccatatcccgcagtggatcgagctggttaaagcggggaatatcgccgccgcggtcgcgctttcccatcagaccaactgcctgccggagatcaccggccgcgtctgtccccaggaccggctgtgtgaaggcgcctgcaccctgcgcgatgaaagcggggcagtcaccatcggcaatattgagcgctatatttccgaccaggcgctggccagcggctggcgtccggacctttcgcaggttaagccgagcggcaagcgggtggcgattatcggcgccgggccggccgggctggcctgcgccgatatgctggtgcgccacggcgtccagccggtggtcttcgaccgtcatccggagattggcggtctgctgaccttcggcattccggcgttcaagctggataaatcgctattggcccggcggcgggcgatcttcagcgagatgggtatccgctttgagctcaattgcgaggtggggaaagatatctccatggcgacactgctggccgagtatgacgcggtgttcgtcggcgccggaacctatcgctccatgaaggcggggctgccgaacgaagaggcccccggggtctacgatgcgctgccgttcctcatcgccaacaccaaacaggtgatggggctggcggcatcggcgcaagagccttatgtcaacaccgccgggctgaacgtggtggtgctgggcggcggcgatacggcgatggactgcgtgcgcaccgcgctgcgccacggcgcccgccaggtgacctgcgcctatcggcgagatgaagccaacatgccgggctcgaaaaaagaggtcaaaaacgcccgcgaagagggggcgctctttgagtttaacgtccagccggtgacgcttgagctggacgagaacgggcgggttaacggggtacgctttttgcgcaccgagctgggcgctccggacgccgggggaagacgccgtccgacgccgatccccggcagcgagtttgttatgccggcagatgcggtgatcatggcctttggcttccacccgcaccgcatgccctggctggaagcggcgggggtggcgctggacagtcaggggcgtattaaagccggagtggagagtcgttaccgttatcagaccagtcaggagaagatctttgccggcggcgatgccgtgcgcggcgcagaccttgtagtgacggcgatggcggaaggccgtcacgcggcgcaggggatcctggactatctggcgcggaaaacgacgccgcttcactgacgacaaacccggctccgcagcgtagtatgagggcgtccttttacgctgtggggtcggtatgtcactcaatattcacgtcattaaagataaaatcctctctgagaactggttcgtactacgcaacatgacctatgagctgacgcgggcggacggcagcgtcgtgcgccacaagcgcgaggtctacgatcgcggcaatggcgccaccgtgctgctgtataaccgccataagcagacggtggtcctggtgcgtcagttccgtgtcgccacctgggtcaatggcaatcatgacggcatgctgattgaaacctgcgccgggctgctggacaacgacgagccggaagcctgcattcgtaaagaggcggtggaagagaccggctacgaagtgggcgaggtgagaaagctgtttgagctgtttatgtcgccagggggcgtcaccgaggtagtgcatttctttatcgccgagtacagcgacgcgcagcgaaccaccagcggcggcggggtggatgatgaagccatcgaggtgctggagctgccttttagccaggcgctgcagatggtcgctgacggggagatccgcgacggtaaggcggtcattctgctgcaatatctgcaaacctccggcctgatgtcggggaactctgacaaatccgattgagtaacccgctgccgttgtccaggataggcgccgtggtcgggtttatctggggtcgggcggttcatgctttttcgcgtcatctttttcctttttctggcggtgctgccttgctcgcaggcatggtcggcaccgacgcagcagcgcttcaacgactggctggtcacctgtaacaaccaaaatttctgcgtcacccgtaacgtggggctgcatcatggcctggtgatgaccctcagccgcagcgctggggcagtcactgacgccagtctgcgtatcgagctgggcggcaccggcaatccagtggcgacgctcgcgccgatagcgccgcgcctgctgctggatggtaaaccgctgtccctgaccgacaagcgctggcacattgaagataaactcattaaaaccgccgacagcgtgacgatcgatgcgtttctccagcaggttcaggagggtaaagcgctctcgctggccaatggcctgcagaccatctccctgcaggggttgaaagcggctctgttttttatcgacgatcggcaaaagcgggtaggtagcgaaacggcctgggtcggcaaaggggaagagccgccgctcagcgtaccgccggcgccggcgctgcgcgcggtggcgagcgcggaaacggcgcagtcgccgctggggcgtgaggagctcaacgatctgatggactatggtaatgagcggatgaccaacagccactgctccctcgatcccttccgccgcgaaattcgcgttacagcgctgacggatgacaaagtgctgctgatgaccagctgcgaatccggcgcctacaacaccgtctggctggcctggctggtctcccgccagcgcccctatgtcgcccatcaggtgcggctaacgttgccatttcagccgccgggcgaggcgccgcgggagattgagctgatcaacgccagctatgatgaccgccgccatgagctggtgaccctggataaaggccgcggggccggcgattgcgggatccaaacccgctggcgttttgacggccagcggttcagcctctcccgctacgcgcagcagccgacgtgcgacaactggcaggggccagatgcctggcccacgctgtggatcacccgttaagcacctgttcggcggtggcgacgatatggtcgaccgtaaagccaaagaacgggaacaactgctctgccggggcggattcgccatagccggtcatgccgacgatcttgccttttaagccgacatatttataccagtagtccgctatcccggcttcgaccgccacccgggcgctgacgtccgacggcagcacggattcgcgccaggcctcatcctgggcgtcaaacacatcagtggaagggagcgagacgacccgcacatttacccctttggccaacagtttttccgcggccaggacggtgatctccacttccgagccggtggcgatgaggatcaggtcgggcttgccgccggcatccttaagcacgtagccaccccgggcgatatcctgcacctgttccggggtacgcggcatctgcgccaggttttgtcgcgacaggatcagcgccgtcggcccgccctgtcgcgcgatagccgcctgccaggcgacggcggtctccacctggtcgcaggggcgccaggtgctgaagttgggcgtcagccgcagactggccagctgttccaccgcctggtgcgtcggcccgtcttccccaagaccgatcgagtcatgggtatagaccatgatctgccgggccttcatcagggctgccatgcgcgcggcgttgcgggcgtactccacaaacatcaggaaggtcgaggtataaggaataaagcccccgtgcagggcaatgccgttggccaccgcggtcatgccaaactcgcgcacgccgtagtggatataattgcccgcaggatcttctttaatcgatgtcgatccagaccagatggtcaggttactcggcgcaagatccgcagaaccgcccagcagttccgggaggtgcgggccgtaggcgttcagcgcgttttgcgaagccttgcggctggcgattttcgccggctcggcctgcagtttcgccacgtagtcgcgggcgatcgcggcaaagtcttccggcagggcgccattcatacgtcgggtcagctcagcggccagctccgggaactgctgctggtaggcggcgaatttctcgttccaggcgtgctccgctttttccccgcgcggacgcgcatcccagcccgcgtagatctctttcgggatctcgaacggaggatatttccagccaagctgctggcgggccagcgctacctctttttcgccaagcgccgccccgtgagactcctctgagccggctttgttgggcgaaccgaaaccgatgatggtccggcagataatcagtgacggtttatctttcaccgcctgcgcttccgttatcgcctgtttgatagcctgcggatcgtggccgtcgatatcgcctatgacgtgccagtgataggcgcggaagcgttccgccgtatcatcggaaaaccagccttcggttttgccgtcgatggagatgccgttgtgatcgtaaaaaccgatcagcttgcccagtccgagcgtgccggccagcgaacaggcctcatgggagatcccctccatcaaacagccatcgcccatgaacacccaggtgtgatggtcaatgatctcatggccggggcgattaaattgcgccgccagcgtccgttcggcgatggccatcccgacggcgttcgccagcccctggcccagcggaccggtggtggtttccaccccaggggtatagccatgctccgggtggccgggcgttttagagtgcagctgacggaactgcttcagttcagacagcggcagatcgtagccggtcaggtgcagcagactgtagagcagcatcgacgcgtggccgttggacaagatgaaacggtcgcggtccacccagtcagggttctgcggattgtgcttgagaaaatcgttccacagcacttcggcaatatcagccatccccatcggcgcaccgggatggccggagttggctttctgcacggcgtccatactcagggcgcggatggcgttggcaagctctcttcgggacatatttttctccgtgagactaaagtgacagtttggcggcaagcagatcttccagtttgcgctgatcgacggcgaacaggcggatcccctccgctagcttttcgaccgccatcggatcctgattatgttcccagcggaactccgcttcactgagcggcaccggacgcggcaggatctggctggcagggatcagtttgcgcaccaccggggtatcgctggcctgcagctcttttaataaaggcggggcgatggtcaaccggtcgcaaccgaccagcgccaggatctgctcggtgcggcggaagctggcgcccatcacgatggtgttgtatttatgctgtttgaaatagtcatagatattgcgcaccgatttcacccccggatcttcctccaccacgtaaggctccagcggtttgcgcgcctgataccagtcataaatacgcccaacgaacggggagatgagataaaccccggcctcggcgcaggcccgggcctgggcgaaggaaaacagcagcgtcaggttgcagtggatcccctctttctccagcacctccgcggcgcggatcccctcccaggtggatgccagcttgatcaggatccgcgacttatcaatgcccatctcctgatacagcgccaccagatggcgagccttctcgatacttttctcgcggttgaaggagagccgggcgtccacctcggtggagacccgtccgggaatgcttttgaggatctccgcgccaaaattgaccgccagcttatcgcaggcgtgagtcacctgcgcttcgcggccgccaccctgttttttggcccaggcgatagcgtcgtcgatgaggccgctataggacgccaggccggcggccttcagcagcagagaggggttggtggtggcgtcttccggatggtagtggcggatggattcgatgtctccgctgtcggcgaccaccgtggtgaactgcttgatgctgtctaactgattcatggataagtcctcctggaacaaggtgttacatgagtgcttgccggtatacggtataaacattgatgaggtacataaccaaaaagcatagcagacagggctattattggcggcgaatccgggtaacataaccgctataaattgataacaacaaaatcataacgatggccagagtttggcggtgttcaaagtttatcgccccgccaggagggatactgtctgccactgaaaggtgaacgacaggatggtcatcacgcttttcccctacgaacgatacgtgaaagaaaggaatagaaaatggatgagcagttaaaacagagcgccctcgatttccacgaatttccggttcccggaaaaatccaggtctcgccgaccaaacctctcgccacccagcgcgatctggcgctggcctactcgccgggcgtcgcagccccctgcctggaaatcgaaaaagatccgctggccgcctacaaatacactgcccgcggcaacctggtggcggtcgtctccaacggcaccgcggtgctggggctcggcaacatcggcgcgctggccggtaagccggtaatggagggcaaaggcgtcctgtttaagaaatttgccggtatcgatgtgtttgatatcgaagtcgatgagctggatccggacaaattcattaacgtcgtcgccgccctcgaaccaaccttcggcggtatcaacctggaagatattaaagcgccggagtgtttctacatcgagcagcagctgcgcgagcggatgaatatcccggtcttccatgacgatcagcacggcacggcgatcatcagcaccgcggcgatcctcaacggtctgcgcgtcgtcgagaagaatctgtccgacgtgcggatggtggtctctggcgcgggcgcggcggcgatcgcctgtatgaatctgctggtggcgctggggatgcaaaagcacaacatcgtggtctgcgattcgaaaggcgttatctataaagaccgtgagccgaacatggcggaaaccaaagccgcctatgcggtggaagacgatggcaaacgcaccctcgatgacgtgatcgacggcgccgacattttcctcggctgctctggcccgaaagtgctgactcaggagatggtgaagaagatggcgcgcgcgccgctgatcctcgccctggccaacccggagccggaaattctgccgccgctggcgaagcaggtccgcgatgacgccatcatctgtaccggccgctccgactaccctaaccaggtcaacaacgtactttgcttcccgttcatcttccgcggcgcgctggacgtcggcgcgacggcgatcaacgaagagatgaagctggcggcggtgcatgcgattgccgagctggcccatgccgagcagagcgaagtggtggcctccgcctacggcgatcaggatttaagctttggtccggagtacatcattccgaaaccattcgacccgcggctgatcgtcaagatcgcccccgcggtggcgaaggcggcgatggactccggtgtggcgacgcgcccgatcgctgattttgacgcctatatcgagaaactgagcgagttcgtctataaaaccaacctgtttatgaagcctatcttctctcaggcgcgcaaagagccgaagcgcgtggtgctggcggaaggggaggagactcgggtgctgcacgccacccaggagctggtgtctctgggactggccaaaccgattctggtggggcgcccgagcgtgattgaaatgcgcatccagaagctgggcctgcagatcaaggccggcgttgactttgagatcgtcaataatgaatccgacccgcggtttaaagagtactggagcgagtactaccagctgatgaagcgccgcggcattacccaggagcaggcgcagcgggcggtgattagcaacaccacggtgattggcgccatcatggtgcatcgcggtgaagcggatgcgatgatctgcgggactattggcgagtaccacgatcactaccgcgtggtgcagccgctgtttggctatcgcgacggcgtcagcaccgccggggcgatgaatgcgctgctgctgccgagcggcaacacctttatcgccgatacctatgtcaatcacgatccgtcgccggaagagctggcggagatcaccctgatggcggcggaaagcgtgcgacgctttggtattgaaccgcgcgtggcgttgctgtcgcactccaactttggctctgccgactgtccgtcagccagcaaaatgcgtaaaaccctggagctggtgaaggcccgcgccccggagctgatgatcgatggcgaaatgcatggcgacgccgcgctggtggaaagcatccgcaacgatcgcatgccggacagcccgctgaagggggcggccaatattctggtgatgccgaatatggaagccgcccggatcagctataacctgctgcgcgtctccagttcggaaggggtgaccgtcgggccggtgctgatgggggtggcgaagccggtgcatatcctgacgccgatcgcctccgtacgtcggatcgttaatatggtggcgctggcggttgttgaagcgcaaaccgaaccgctgtaattttctatttcccccgttaacgcgcggatccgtttccgcgcgcaatatcaggcaggccggtgagtaaaaaacgctgagcctgcctttttaattccaccgcaatattattttctctcctgagtgatccacttcaccttttaaccccacttgccgaaatttgttatttgccgcgctgaaatgtcgtcaccatgaggacagatttcagggggcaatcagtcatggataaagaacgcattattcaggaattcgtaccaggcaaacaggtcacgctggcgcatctgattgcccacccgggagcggagctggcgaaaaagatcggcgtacccgaatccggcgcgatcggcattatgacgctgacgccgggagaaacggcgatgatcgccggcgatctggcgatgaaggccgccgacgtgcacatcggttttctcgaccggtttagcggcgcgctggtgatctacggctcggtcggcgcggtggaggaggcgcttctgcagaccatcggcggattaggccgcttattaaattataccttgtgcgaattaacgaaaagttaattgagagcgaccatgaagcgtattgcgattgtcggcgccgtcggtgcaggaaaaaccacgttatttaatgccctgcaagggaattattccctcgccagaaaaacgcaggcgctggaatttaacgatcgtggcgacatcgatacacccggggaatatttcagccatccgcgctggtatcacgccttaattaccaccttgcaggatgtggacaccctgatttatgtccatgcggccaatgataccgaaagtcgcctgccacccgggttgctggatattggcagccgaaagcaccttatcgtggcgatcagcaaaacggatctgccggatgccaatgtcgccgcggtgcggcagctgctggacgggatggggtttcaggcgccggttttcgccctcaacggttgcgatccgcaaagcgttgcgccgctggaaaattacttgagtgagctcagccaaaaggaggaagggccaggtgaagaaactcattaccgctaacgatattcgtgccgcccacgcgcgcggcgaacaggcgatgtcagtagttctgcgcgccagcattatcaccccggaagcgcgcgaagtcgccgagctgctgggattcactatcaccgaagacgatggcgccgcgccggcggcgacagcggcggacagcgacaaaacggaaagccagcggatccgggaaaccatcctggcgcagctgccggaaggccagtttaccgaaagcctggtggcgcagctgatggaaaaggtgatgaaggagaagcagtccctggagcaggaggcgatgcagccgggatttgactccgtgaccggcaaaggcggcatcaaagtgatcgacggcagcagcgtgaagtttggccgcttcgacggcgcccagccgcactgcgttggcttaacggacctggtgactgaccaggatggcagcagcatggcggccggatttatgcagtgggagaacgccttcttcccgtggacgctgaactacgacgaaatcgatatggtgctggagggcgagctgcatgtgcgccatcagggggaaacgctggtcgccaaagcgggggacgtcatgttcatcccgaaaggctccagcatcgaattcggtaccccgtcgacggtgcgcttcctgtacgtcgcctggccggcaaactggcaatcgctatgaacgatttcattaccgaagcgtggctcagagcgaatcatacgctcagcgaaggcggtgaaatccatcttcctgccgatgcccgcctgacgccctcggcgagggaactgctggaaagtcggcatctgcgggtcaaatttctcgaccgccaggggcgcctgtttgtcgaggatgacgaacagacgccgcagccggtgcatgtcctgaccagcagcgaccatccgccccaggcctgctgcgagctttgtcaccagccggtgggcaaaaagccggacaccttaactcatctgacggccgataccctggtggcgaaaaacgatccgcggctggccttccgcgcggtgctggacagcaccatcgccctgacggtgtggctgcaaattgaactggcggagccctggcagccgtggctgacggatatccgttcgcggctgggcaacatcatgcgcgccgatgcgctggaggaaccgctggcggcgcagtcgatagccggattcagcgaggcgcagctgcatcgtctgtcccatcagccgctgcgttacctgggtcacgatcacctggtgccggaggcccgccatgggcgcgatgtcgcgctgcttaatttgctgcgcggcaaagtgcgcgaggcggaggtgaccgcggcgcaggtgtttattacgccgcaatttgcggtccagcgtgccgatattctacaggcgctcaaccgcctctccagcgcggtctacgtgatgatgatcctgggcgtgacggacgcgccgccggcgctcagccaactgcagcagctgggaggtgaagatgatcattgaccagtgtcgcaaactggcgctgcgcgcccccgccagggtggtgttcccggatgcgctggacgtccgcgtgttgaaggcggcgcattatctgcagcagcagggcctggcgcatccgatcctcgtcgccagccccttcgcgctgcggcagttcgcccttggcgaacgtctgccgctgaccggggtgcaggtcatcgatccgcacagcaacctggcgatgcgcgagacgtttgccgccgcctggcaggcgcgcgccggcgataaagcgcccgctgacgcggtcgacaagctggccgacccgctgatgttcgccgcggcgatggtcagcgccgggcaggccgaggtgtgtatcgccggaaatctctcgtcaaccgccagcgtgctgcgcgctggtctgcgccttatcggcctgcagccggggtgtaaaacgctctcttcgctgtttctgatgctgccgcagtataccggacagccgctggggtttgccgactgcagcgtggtgccgcagccgaccgcggcgcagctggcggatatcgcgattgccagcgctgagacctggcaagcgatcgctggcgaagcgccgcgggtggcaatgctgtccttctcgacacacggcagcgcccggcatccctgtgtggctaacgtccagcaggccacggagatcgtgcgtcagcgggcgccgcagctgatggtcgatggcgagctgcagtttgacgccgcctttgtaccggacgtcgctgcgcacaaagcgcccggcagcccgctgcagggccgggccaatgtgctggtcttcccgtcgctggaggcgggcaacatcggctacaaaatcgcccagcggctgggcggatatcgcgccatcgggccgctgatccagggcctggccgccccgcttcacgacctctcgcgaggctgtagcgtagaggaaattatcgaactggcgctggtggcgtcggtaccgcgccagacggacgcaagccggatccccgactcgtccacgctggttgaatgaatggtccccttcaggaccccttatgagaggaaaacacaatggaagcattaggaatgattgaaacccggggcctggttgcactgattgaggcctccgacgccatggtcaaagcggcccgcgtcaagctggtgggagtgaaacagatcggcgggggcctggtgaccgccatggtgcgcggcgatgtcgcggcgtgcaaagccgcgacggatgccggggcggcggcggctcagcgtatcggtgagctggtctctgtacatgtcatcccgcgcccgcatggcgatctggaagaggtcttcccgattagcttcaagggcgacagtaacatctaacgggggagggggtgccggaaagttctggccggataagacgccagcgcgtcgctatccggccatgaaaaggcatgaatgccggatggcgttgcgcttttccggcctgcacatcacacgcggagacggacatgaagctggctgtggtaaccggatatgtggtctgcaccgtacgccatgaaggtctggcccacgacaaactgctgatggtggagatgctcaatgcccgcggcgagcccgacgggcaatgcgcggtcgccatcgacagcatcggcgcgggatgcggagagtgggtactgctggtcagcggcagctcggcgcgacaggcgcacgcacacggcgcctctccggtcgatctgtgcgtgattggtatcgtggatgaggccgcggccgatggtcaggtgctcttccataagtagggtgaaaaatcatgaatcaacaggacattgaacaggtagtgaaagcggtactgctgaaaatgaaagacagcagccagcctgccggcaccgttcatgatatgggcgtttttgcctcactggatgacgctgtcgcggcggcaacggtggcccagcagggattaaagcgggtggcgatgcgtcagcaggtgattcaggccattcgtgaggcgggtgaaaagtatgcccgtgaactggcggagcttgcggtgacggagaccggcatgggacgcgttgaagataagtttgccaaaaacgtggcgcaggcgcgcggcacgccgggcgtggagtgtctgactccgcaggtgctcaccggcgataacggcctgacgctgattgaaaatgcgccctggggcgtggtggcctcggtgacgccgtccaccaatccggcggcgacggtgatcaacaacgccattagcctgatagccgccggcaacagcgtggtcttcgccccccatccggcggcgaaaaaggtctcgcaaagggcaattaccctgcttaaccaggcggtagtggccgccggcggcccggccaacctgctggtgaccgtggcgaacccggatatcgacaccgcccagcggctgtttaagtaccctggcatcggcctgctggtggtgaccggcggcgaagcggtggtcgaggcggcgcgcaaacataccaacaaacgcctgatcgccgccggggccggcaacccgccggtggtggtggatgagaccgccgatctgccgcgcgccgcgcaggcgatcgtcaaaggcgcctcgtttgataacaacattatctgcgccgacgagaaggtgctgatcgtggtcgatagcgtcgccgacgaactgatgcgcctgatggaaggccagcaggcggtgaaactcacggcggcgcaggccgaacagctccagccgctgctgctgaaaaatatcgacgagcgcggcaaaggcacggtcagccgcgactgggtcggccgcgatgcgggcaaaatcgccgcggcgattggcctgcaggtgccggcgcaaacccgtctgctgttcgtggaaacccccgccagccatccgtttgcggtgactgaactgatgatgccggtgctgccggtggtgcgggtggcgaacgtcgaggaggccatcgccctggcggtgcaactggaaggcggctgccaccatacggcggcgatgcactcgcgcaatatcgacaacatgaaccagatggcgaacgccatcgacaccagcatcttcgtcaaaaacgggccgtgcatcgccgggcttgggctgggcggcgagggctggaccaccatgaccatcaccaccccaaccggggaaggggtgaccagcgcgcggaccttcgttcgtctgcgccgctgcgtgctggtggatgcgtttcgaatcgtataagggatgaacatggcgcacgacgaacaacgctggctttcgccgagactgcaaaaagccgctgccctgtgtaaccaggagcccgccgccagcgagtcgccgctgtggctgggcatcgatttgggcacctgcgacgtggtgtcgatggtggttgaccgtgacggccagccggttgcggtatgccttgactgggccgacgtggtgcgcgacggcatcgtctgggatttctttggcgccgtcaccctcgtgcgccgacatcttgcgactctcgagcagcagctgggctgccgcttcacccatgcggcgacctcgtttccgcccggcaccgatccgcgcatttcgatcaatgtcctggagtccgccgggctggagatcagtcatgtgctggatgagcctaccgcggtggccgatctgctgcagctcgataacgccggggtggtggatatcggcggcggcaccaccgggatcgccatcgttaaacagggcagggtgacgtattcggcggatgaagccaccggcggccaccatatctccctgactctggccgggaatcgcggcatcgggcttgaggaggcggagcagtacaagcgcagccacgccggggagatctggccggtggttaagccggtgtacgagaagatggccgaaattgtcgcccgacatattgccggacaagggattgtcgatttgtggctggcaggcggcgcctgtatgcagccgggtgtgcatgagctgtttcgtcagcgcttcccggcattaccggtgcatttgccgcagcacagcctgtttatgaccccgctggcaatcgccaacagcgggagggaaaaagcggaggggatgtatgcaagctgaactgcagacggcgctgttccatgcctttgatacgctgaatcttcagcaaatgaaaagcttcaacgttccgccggtgacgctgcacggcgtcggcgcgctggcggcctgcggtccgcaagcgcagtcccgaggccttaggcatctgtttgtcatggttgacagttttctccatcaggcgggaatgaccgccgggctggagcgtagcctggcgatgaaagggattgctatgactctctggccctgtcccgccggcgaaccctgcgtcaccgatgtctgcgccgccgtcgcccagctgcgggacgcgcgctgcgacggcgtggtggcctttggcggtggatcggtactggatgcggcgaaggcggtggcgctgctggtcgccaatcctgagcagacgctgggggagatgacggagcacagcgagttgcgtccacgtctgccgctaatcgcggtgccgaccaccgctggtaccgggtctgaaaccaccaatgtgacggtgattatcgatgcggtgagtggacgcaaacaggtgctggcgcatgcctcgctgatgccggatgtggcgatcctcgacgccgcgctgaccgagggcgtcccgccgcatatcacggcaatgaccgggattgatgcgctgacccacgccgtcgaggcctacagcgcccgccacgccacgccgtttaccgacagtctggcgatgggggcgatagccatgatcggcgaggcgctgccgaaagcggtgggctgcggtcaggatctggcggcgcgggagaatatgctgctggcttcctgcatggcggggatggcgttttccagcgccgggctggggctatgccatgccatggcgcatcagccgggggcggcgctgcatattccgcacggtctggccaacgccatgctgctgccaacggtgatggagtttaaccgcatggtacgccgggcgcgcttcagccagatcggccgggcgttaaccggcaagaaaaccgatgaccgcgaggctatcgccgccgtgcgcgagctgatcgccgaggtcggtctgacgatgcggctgacggaggctggcgcgacgtccgcgcactacgacgcctgggcgcaagcggcgcaggaggacatctgtttgcgcaccaatccacgcaccgccagccgggagcagattatcgagctgtacgcggcggcgcgataaatgccgattttcccggaggcgtgtggctgtggctttcccggctcgtgctgcgcttagccgggctacaggatcacagccgtctgctatgccgtagcccgggtaaggcgttcacgccgcggcccgggaaagtcgcctgagtgcggctaatgtcccggtattcacagtatctacaaatcataaatgacagggagtaagggctatgggaattaacgaaatcatcatgtacatcatgatgttctttatgctgattgccgccgtggacaggatcctgtcgcagttcggcggctcggcgcgctttctcggcaaactggggaaaagcattgagggatccggcggtcagtttgaagaagggtttatggcgatgggcgcgctgggcctggcgatggtcgggatgaccgccctggcgccagtgctggctcatctgcttggtccggtgattattccgctgtatgagatgctcggcgccaacccgtcgatgttcgccggcacgctgctggcgtgcgacatgggcggtttcttcctcgctaaagaactcgcgggcggcgacgtggcggcctggatgtactcaggcctgatcctcggctctatgatgggtccgaccattgtgttctccattccggtggcgctcggcattatcgaacctgccgatcgccgctggctggcgctcggcgtgctggcgggcattgtcaccattcccatcggctgtatcgccggcggtctggtggcgatgtattccggggtggagatcaacggccagccggtagagtttaccttcgcgctgatcctgatgaatatgatcccggtgatcatcgtcgccgtgctggtggcgctggggctgaagtttattccggaaaaaatgatcaacggcttccagatcttcgccaaattcctcgtggcgctgatcaccatcggcctggcggcggcggtgatcaagttcctgctcggctgggagctgatcccggggctcgatccgatctttatggcgcctggcgaccagcccggcgaggtgatgcgcgccatcgaagtcattggctctatctcctgcgtgctgctcggcgcttacccgatggtgctcctgctgacccgctggtttgaaaagccgctgatgcgcgttggtaatctgttaaaaatcaacaatatggctgccggcggcatggtcgctaccctggcgaacaatatcccgatgttcggcatgatgaagcagatggatacccgcggaaaagtgatcaactgcgccttctcggtgtcagcggcgttcgccctcggcgaccatctcggttttgcggcggccaatatgaacgccatgatctttccgatgattgtcggcaagctggtcggcggcgttaccgcgattggcgtggcgatgctgctggtgccaaaagatgaaaacgtaccggcgcctgccaacaacgaagcggaggcgcactcgtgaacacgcgccagctgttgagcgtcggtattgatatcggcaccaccaccacgcaggtgatcttctcgcgcctcgagctggtgaaccgcgcggcggtttcccaggtgccgcgctacgaattcatcaaacgcgacattagctggcaaagcccggtcttctttacgccggttgataaacagggagaactgaaagaggccgagcttgaggcgctgattctggctcagtaccgggccgcagggatcgctccacaagcggtggattccggggcgatcatcatcaccggcgaaagcgcgaaaacccgcaatgcccgcccggcggtgatggcgctctcgcagtcgctaggcgattttgtcgtcgccagcgccgggccgcatctggagtcggtcattgccggacacggcgccggggcgcagaccctgtcccggcagcggatgtgccgggtgctcaatatcgatattggcggcggtacctcgaactatgccctgtttgacgccggaaacgtcagcgccaccgcctgcctcaacgtcggcggccgcctgctggaaaccgacgctcaggggcgcgtggtccacgcgcatccgccggggcagcggattgtcgatgcgctgtttggcgccggcactaacgcccaggcgctgaccgccgggcagctggcgcaggtggcgcgccggatggcggcgctgatcgtcgaggtgatcgagggcaccctctcaccgctggcgcaggggctgatgcaaaccgaagtactgcctgcgggtgttcagccggaggtgattaccctttccggcggagtgggggagtgctaccgccatcagcccgccgatcctttctgcttttccgatatcgggccgctgctggccacggccctgcacgagcatccgcgcctgcgtgagatgaacgtgcagttcccggcgcaaaccgtgcgcgccacggtgattggcgccggggcgcatacgctgtccctgtccgggagcaccatctggctggagggggttccattgccgctgcgcaatctgccggtggctatcccgcaggatgccgccgatctgccgaacgcctggctccaggcgctaacgcagctcgatctggcccccgaggcggacgcttacgtgctggcgcttcccgcttcacttccggtgcgctacgccaccttactgaccgtaattgacgccctgctggcgtttgtcgcccgctttcccaatccccgtccgctgctgctggtggccgagcaggattttggcaaagcgctgggcatgctgctgcggccacagcttccacaccttccgctggcggtcatcgatgaggtgagcatccgggcgggagactatatcgacattggtacgcctctttttggcggatcggttgtgccggtgacggtgaaatcactcgcatttccttcctgagggaacgacttatgaaactaaagaccacattgttcggcaatgtttatcagtttaaggatgtaaaagaggtgctggcgaaagccaacgaactgcgttcgggggatgtgctggcgggggtagcggcggagagttcgcagcagcgcgtggccgccaagcaggtgctctccgatatgacggtggccgatatccgtaataacccggtgatcccgtatgaggaggactgcgttacgcgcctgatccaggatgacgtgaacgaaaccgcctatcagcggattaaacactggaccatcagcgacctgcgggaatacgtgctcaacgacgaggtcaccagcgacgatatcgcctttgtccgcaaagggctgacctccgaggtggtggctgcggtggccaagatctgctccaacgccgatctgatctacggcggtaaaaaaatgccggtgatcaaaaaagccaataccaccatcggtctgccggggacctttagctgccgcctgcagccgaacgatacccgcgacgatgtgcagagtattgccgcgcaaatctatgaagggctctccttcggcgcgggcgacgcggtgattggcgtcaacccggtcactgacgacgtggagaacctgagccgggtgctggatacggtgtacggggtgatcgacaagtttaacatcccgacccagggctgcgtgctggcgcacgtcaccacccagattgaagccatccgccgcggcgcgccgggggggcttatcttccagagcatctgcggcagtgaaaaagggcttaaagagttcggcgtcgagctggcgatgctcgatgaagcgcgggcggtgggggcggagtttaaccgcatcgccggggagaactgtctttactttgaaaccgggcagggctcggcgctttccgctggcgctaacttcggcgccgaccaggtgaccatggaagcgcgtaactatggcctggcgcggcactacgatccgttcctcgtcaacaccgtggtgggctttatcgggccggagtatctctataacgaccggcaaatcattcgcgccggactggaagaccactttatgggcaagctgagcggcatctcaatgggctgcgactgctgctataccaaccatgccgatgccgaccagaacctcaacgaaaacctgatgatcctgctggcgaccgcaggctgcaactacatcatgggcatgccgctcggcgacgacatcatgctcaactaccagaccaccgccttccacgataccgcgaccgtgcgccagctgctgggcctgcggccgtcgccggagtttgaacgctggctggaaacgatgggcattatggcaaatggtcgcctgaccaaacgggcgggcgatccgtcactgttcttctgatgacgcggggatgacacatcatggatcaaaaacagattgaagacattgtacgcagcgtaatggcatcaatgggacaaccacagtcgcagccgcaggcccccgcagcgtcgactccggcctgccatgccgcctgcgccagcgaagcggtggtggaaagctgcacgctggacctgggctcagcggaagcgaaagcctggattggggtacaacatccgcaccgcgccgaagtactgactgaactgaaacgcagtaccgcggcgcgcgtttgcaccggccgcgccggcccgcgtccgcgcactcaggcgctgctgcgcttcctggccgatcactcgcgctcgaaagacacggtgctcaaagaggtgccggaagcgtgggtgaaagcgcaggggctgctggaagtgcgttccgagattagcgataagaacctctacctgacgcgtccggatatgggccgtcgcctcagtccggaagcgattgatgcgctgaaggcgcagtgcgtgatggatccggatgtgcaggtggtggtgtccgatggcctgtcgacggatgccatcaccgccaactacgaagagatcctgccgccgctgcttaccggcctgaaacaggcgggtctgaaggtcgggacgccgttcttcgtgcgctatggccgcgtcaagattgaagatcagatcggcgagatcctcggcgcgaaggtggtgatcctgctggttggcgagcgcccggggctcggccagtcggagagcctctcctgctacgcggtgtactccccgcgggtggcgaccaccgtcgaggccgaccgaacctgtatctccaatatccaccagggcggcaccccgccggtagaagccgccgcggtgatcgtggatttagccaaacgcatgctggagcagaaagcctccggcatcaacatgagccgttaaggaggcatcatgccagcattagatttgattcgcccctcggtcaccgcgatgcgcgtgattgcctcggtgaatgacggtttcgcgcgcgagcttaaattaccgtcgcatatacgtagcctcggactcatcacggcagattctgacgatgtgacgtatattgccgccgacgaagcgacaaagcaggcgatggtggaggtggtctatggccgctccctctacgccggtgcggcccatggtccgtcgcctaccgccggcgaagtactgatcatgcttggcggcccgaacccggcggaagttcgcgccgggctggatgccatgatggcgcatattgaaggtggggcggcattccagtgggctaacgacgcgcaagataccgcgtttctggcgcacgtggtgtcgcgtaccggctcttatcttt

SEQ ID NO: 5324 - DNA, 207716 bp, Unknown
  gut microbiota DNA sequence
gatggtagtgtggggtctccccatgtgagagtagggaactgccaggcatcaaataaagcagaaagcccggtcgaaagaccgggctttttgtttttgcgtttaaaaagaaccccgtcccgaaaggtgcgggtttttttgctgtgtggggtatatctcccccggtggcgctgcgcttaccggggctacagatcctcggccacctgctggccgaggggacatcaatgccgcaaagttaccgacgtcaatcgtagtctgcttcagcctgctgctcatacatcaaattcaataacggatacggttgccccagatcgtccgtttcagagcgccctgtcaccctaaaacccatcttctgataaaacccgaccgcttgttcattctgctcatttacattggtcgtcagcttcggcgttaacgacagcgcatgctcaatcagcaacttccccacgccacagccgcggacatccggatcgacgaacagcgcatccatatgatctccggtcagcagcataaaggcgatcggctggtcttccgtattaaccgccacccacagcggagcctccggtaaaaatgcgcgtaccatctcctccagctcctttcgatacgcttttgtcagaaaatcatgcgtggcgtcgaccgaccgacaccagatcgcagtcagtttatccccttcatcaggccgggaacggcggatgttaataaccatactttctccttttctacattcttatattctaactcaacaagcgccgtgaaattttctcaccgtgaacatgcagactcgacattcacccgattcctggttatcttcagctatctggatgtctaaacgtttatacgtatgctatgaggtaatacagttatgccaattcgggtgcaggacgagctgccagccgtcaatttcttgcgtaatgaaaacgtcttcgtaatgacgacaacacgtgcaacgactcaggaaatccgccccctgaaggtgttaatcctcaacctgatgccgaagaaaatcgagacggaaaatcagttcctgcgtctgctatcaaactctccgctgcaggtggatatccagttattgcgtatcgatgcgcgcgagtcgcgtaatacccctgcggagcatctgaataacttttactgtaatttcgatgagatctgcgatcagaactttgacggcctgattgttaccggggctcctttaggcctggttgagtttaacgatgttgcttactggccgcagatcaaacaggtactggagtgggccaaggatcacgtcacttcgacgctgttcgtctgttgggcggttcaggccgcgctgaacattctgtacggcattcccaagcagacccgcgccgaaaagatttccggcgtctatgaacaccatattcttcatccgcacgccttactgacccgcggtttcgacgactctttcctggccccgcactcacgctatgctgattttccggccggacttattcgcgactataccgatcttgagatcctcgcggagacggaagagggcgatgcgtatttgttcgccagtaaagataagcgcatcgcctttgtcaccggccacccggagtacgatgccaataccctggcaagtgaatatttccgcgatgtggaagccggtttgaaccctgagatacctcataactatttcccacaaaacgacccgcagaacaaaccgcgcgccacctggcgcagccacggcaatctgctgttcgctaactggcttaactattacgtctaccagattacgccatacgatctgcgtcatatgaatccgacgctggaataatactctatgtgagacgatcctaaagcgtttcagcattttgcctctggcaccttcgggtgccttttttatttccgaaattcacttcatacacgatgataactttaatttcattgttatcaatgtgttaatgataatttaaaattaaaatggaaattgtttttgattttggaaattaattgagtagtcttaattgtgctgagcgaaaactgcacaacgatctttcgctcgcttccagcggatcaaccaagaggagcagcacaatgacgcagcaggcgacaatcaccgatgaactggcctttagtcagccctatggcgagcaggagaagcagatcttaacgcctgaggcggtagaatttctgacggaactggtgagccgctttacgccggcgcgcaataagctgctggccgcgcgtttgcagcaacagcaggctattgacgacgggcagcttccggattttatttcggaaactgcttccattagaaatggcgactggactattcgcggtatcccggctgatttgcaggatcgccgcgtggaaatcaccggccccgtcgagcgcaagatggtcattaacgcgctgaatgccaacgtcaaagtctttatggcggactttgaggattcgctggcgcctgactggcgcaaagtcattgatggtcaaatcaacctgcgcgatgccgtgaacggaaccatcagctacaccaacgaggccggcaaaatctatcagttgcagcccaatcccgctgtgctggtatgccgtgtgcgcggcctgcatctgccggaaaagcatgtgacctggcgtaatgaggccatccccggcagcctgttcgattttgcgctctatttctttcataactaccaggcgctgctggctaaaggaagtggtccctacttctatctgccaaaaacacaggcctggcaggaggcggcatggtggaacgatgtcttcagttttacggaagatcgctttgacctgccgcgcggcaccatcaaggccacgctgctgattgagacgctgccagcggtgttccagatggatgagatcctgcatgcgctgcgcgaccatattgttggcctgaactgcggccgctgggattacatcttcagttatatcaagactctgaaaaaccatccggatcgcgtactgccggaccggcaggtggtgacgatggataaacccttcctcagcgcctactcacgcttgttgattaagacctgccacaaacgcggcgcgtttgcgatgggcggtatggcggcgtttatcccgagcaaagataccgaacgtaaccgccaggtgctgagtaaagtcaccgccgataaagagctggaggcaaacaacggtcacgatgggacctggatcgcccacccgggcctggcggataccgccatggcggtgtttgaccgcgtgctgggcgataagccgaatcagctctcggtcacccggagcgaggatgcgccaattaccgctgaacaactgctggctccctgcgagggcgaacgcacggaagccggaatgcgcgccaacattcgcgtggcggtgcagtacatcgaagcgtggatctccggcaacggctgcgtaccgatttatggcctgatggaagacgccgcaacggccgagatctcgcgcacctctatctggcagtggatccatcatcagaaaaccctgaacgacggtaccccggtcactaaggcgctgttccgccagtggctggcggaagagctgatggtgattcaggaggagctgggagagcaccgcttcagccacggccgctttgacgatgcggcgcgactgatggagcagatcaccacctccgacgagctaattgattttctgacattgccgggctaccgcctgctggcctaatcgccagatggtgtggttcgccatttagtccttcacctatgagcctggggagccaggaaattatatggagcatctgcacatgaaaacccgtacccaacaaatcgaagaattaaacaaagaatggacgaacccgcgctgggaaggcattacccgtccctacagcgcggaagaggtggtgaagttacgcggctcggtgaatccggaatgcacgctggcgcagcttggcgcggcgaaactgtggcgtctgctgcacggggaggcgaaaaaagggtacgtcaacagtctcggcgcgctgaccggcggccaggccttgcagcaggcgaaggcgggtatcgaagccatttatctctccggctggcaggtggcggcggatgctaacctggcgtccagcatgtatccggatcaatcgctgtatccggccaactcggtaccggcggtggtggatcggatcaacaacaccttccgccgcgccgatcagatccagtggtcagcgggaattgaaccgaacgatccgcgctttatcgactacttcctgccgatcgtggcggatgcggaggccggttttggcggcgtcctgaacgcctttgagctgatgaaatcgatgattgaagccggtgcagcggctgttcacttcgaagatcagctggcatcggtgaagaagtgcggccatatgggcggtaaagtgctggttccgactcaggaagcgattcagaagctggtggcggcgcgtctggcggccgacgtgatgggggtcccgacgctggtcatcgcccgtaccgatgccgacgccgcggatttaattacctcagactgcgatccgtacgatcgtgagtttattaccggggatcgcaccagcgaagggttcttccgcacccacgccgggatcgagcaggcgatcagccgcgggctggcctacgcgccgtatgcggatctggtgtggtgtgaaacgtcgaaaccggatctcgagcaggcgcgccgctttgccgaggctatccatgcgcgtttcccgggcaaactgctggcctataactgctcgccgtcgtttaactggaagaaaaatctcgatgataaaaccatcgccagcttccagcagcagctgtcggacatgggatacaaataccagtttattaccctcgcggggatccacagcatgtggttcaacatgttcgacctcgcccatgcctacgctcagggtgaggggatgcgccactatgttgagaaagtgcagcagccggaattcgccgccgggccggaaggctacaccttcgtctcgcatcagcaggaggtgggcaccggctacttcgacaaggtcaccaccattatccagggtggcacctcgtcggtaacggcgctgaccggctcgaccgaagaagatcagttttaagccatgcccggtggcgcgacgctgaccgggcctgcaagaggacgcaggccggataagcgagcgcgccatccggcatgacgtggcgccggatgggggaaagcgatgacgcgtggtctggaattactgattgcccaaacgatattgcagggatttgacgcgcagtatgggcgttttcttgaagtcacttccggcgcgcagcagcgctttgaacaggctgactggcacgccgtgcagcaggcgatgaagcagcggatccatctctacgatcaccacgtgggcctggtagtagagcagctgcgctgcatcaccgaagggaaaagcaccgacgtcgattttcttctgcgggtgaaacagcagtacacccaacttttaccggattaccctcgctttgaaattgctgagagctttttcaattcggtctactgccgcctgtttgaccaccgctcgctgacccccgagcggctctttattttcagctcgcagcccgagcgaccctttcgtaccctcccgcgaccgctggcgaaagatttctttccggaacgcggttggtcgcacctgctgggtaaagtactgtccgatctgccgctgcggctaccgtggcaaaacaaagcgcgggatatcggctatatcattgccagtctgcaggaggcgctgggggaggaactgctcgccacctgtcatctgcaggtcgccaatgagctgttctaccgcaataaagccgcctggctggtgggcaaactggtcatgccgatggcgacgctgccttttttgctgccgatccaccgcagcgaagagggtgagctgtttgttgacacctgcctcacaacccatgccgaagcgagtatcgtttttggcttcgcgcgttcctattttatggtttatgcgccgttgcccggcgccctggtggaatggctgcgcgagatcttgccgggtaaaacgacggccgagctgtacatggcgattggctgtcagaagcatgccaaaaccgaaagctatcgcgaatatctacactacattactcgctgcgatgagcagtttattgaagcgccgggtattcgcgggatggtgatgctggtgtttaccctgccgggctttgaccgggtgtttaaggtgatcaaggaccgcttcgcgccgcagaaagagatgaccgccgcccatgtgcgggcttgctatcagctggtaaaggagcatgaccgcgtcgggcggatggcggacacccaggagtttgaaaatttcgtgctggataaacggcaaatcgcgccggcgctgctggcgctgctgcaggcggaagcggggaacaaactcaccgatctcggcgaccgcatcgtcatcagccatctctatattgaacggcgaatggtgccgctcaacctgtggctggagcaggttaacggccaggcattgcgtgatgcggtagaagagtatggcaatgctatccgccagctggccgccgccaacatctttcccggcgatatgttatttaaaaacttcggcgtcacccgccatggccgggtggtgttctacgactatgatgaaatctgctatatgacggaagtgaattttcgcgagatcccgccgccgcgctatccggaggatgagctggccagcgagccgtggtacagcgtttcgcctggcgatgtgtttccggaggagttccgccactggctgtgcgccgacccgcgcattgggccactgtttgaagagatgcatgccgacctgctgcgcgccgactactggcgcgcactgcagatgcggattaaaaacggccatgtggaagatgtctacgcctaccggcgcaagcagcgttttagcgtgcgctatggcgccgacagtagaccggataaggcgtttacgccgccatccggcaaggtgcgccgatctgcctgatggcgctacgcttatcaggcctacttaaaatgcccttctggggcatttttttatttaaccccgccatacgccagcgtcacttccttcgccgccttgatcaccagcgcgcccagctcagtcacccgatcatcggtcatacgcgagatggggcctgagatggagattgccgcgaacggttcgcgatgttcatcgtaaatgcaggcggcgacgcagcgcaggccgagcgcgtgctcctcatcatcgaaagagtagccccgcttgcgggtctgggctaaatcttccttcagatgcagcggggagaccagcgtggcatgcgtataggcatgcagccctttacggtgcagcagactggtgacctgctcttcgctcagctgcgcgagaaacgccttcccggcgccggaagcgtgcatcggcagtttaccgccgattggcgccgacatccgcatcagctgggtgcactgcacctgatcgataatgatcgcctggtggtcgctctggtcgagcaccgccagattcaccgtttcaccggaatcttccatcagctggcgcaggatcgggtggacaatggccagcagattgcggctttgtagaaagctgctgccgaccacgaaagcatgcgccccgacggcccagtgacccagctcgccaacctggcggacgaagcccagctgttgcatggtggtcagcagacggtgagtcgtggagttgggcagacccgcctgctgcgccagttcggtcagcgcgacgctgctgtgggactcggcaatccattcgagtaatttcaggccgcgggtcagcgactgaacctgaccgccagcctgctgggcagtggcagccgcgggttttctgccgcgtttcgcgggaatgggggtagtggccatcgcgaactcctttttctgtatcgtggaaataattttcgttttatttggcaataatgcaatcacaaccggactcatcggatgagtgaagctgaacatgtctcatattgcccgttgttgtcttttccgctccggtggtttatgccagtatggtttgttggctatttggcctgagtcgagcgttgtcgggagcaagtgtgagcagcaaagttgagcaactgcatcagcagttaaaagaacgtattctggttctggatgggggcatgggcaccatgatccagggctatcgtctgagtgagcaggactttcgcggtgagcgctttgctgactggccgtgcgacctgaaaggcaacaacgacctgctggtgctcagcaaacccgaagtgatccgcgagatccacgacgcctatttcgaggccggcgcggatatcattgagaccaacacctttaactcgacgaccatcgcgatggcggattaccagatggaatccctgtcggccgagatcaactttgccgcggcgaagctggcccgcgccagcgccgacgcctggacggcccgcacgccggaaaaaccgcgctatgtcgcgggcgtgcttggcccgaccaaccgcaccgcctctatctcgcctgatgtgaacgatccggcgttccgtaatattacctttgaccagctggtggccgcctatcgcgaatccacccgggcgctggtggaaggcggcgtggatctgatcctgattgaaacggtgtttgacaccctgaacgctaaagcggccatctatgcggtgaaagaggagctggaggcgttaggcgttgacctgccgctgatgatctccgggaccattaccgatgcctctggccgcacgctttccggacagaccaccgaagccttttataactcgctgcgtcacgccgaagccttatcgtttggtctgaactgcgccctcgggccggacgagctgcggcagtacgtccaggagctgtcgcgcattgccgaatgctacgtcaccgcgcacccgaacgccggcctgcccaacgccttcggcgaatacgatctggacgccgacaccatggcgacgcaaattcgcgaatgggcggaagccggtttcctcaatatcgttggcggctgctgcggtaccaccccggagcatatcgccgccatgagccgggcggtagcgggcctgccgccgcgtcagttgccggaaattgcggtggcctgccgcctcgccggcctggagccgttgaatatcggcgacgatagcctgttcgttaacgtcggtgaacgaactaacgtcaccggctcggcgaaatttaagcggctgattaaagaagagaagtacagcgaagcgctggacgttgcgcgtcagcaggtggaaagcggcgcgcagattatcgatatcaacatggacgaggggatgctcgacgcggaagcggcgatggtgcgtttccttaacctgattgccggcgagccggacattgcccgcgtgccgatcatgattgactcctccaagtgggaagtcattgaaaagggcctgaaatgtattcagggcaaaggcatcgttaactcgatttcgatgaaagagggcgtcgaatcctttatccaccatgcgaaactggttcgccgctacggcgccgcggtggtggtgatggccttcgacgaggttggtcaggccgacacccgcgaacgtaaaattgagatttgccgtcgcgcctacaaaatcctcaccgaagaggtcggcttcccgccggaagatattatcttcgaccccaatatctttgccgtcgccaccggtatcgaagagcataacaactacgcacaggactttatcggcgcctgcgaagacatcaaacgcgagctgccgcatgcgctaatctccggcggggtctccaacgtctccttctccttccgcggtaatgacccggtacgtgaggcgatccacgccgtattcctctactacgcgatccgcaacggcatggacatggggatcgtcaacgccggtcagctggccatctatgatgacctcccgggcgagctgcgcgacgcggtcgaagacgtgatcctcaaccgccgcgatgacagtaccgaacggttacttgagctggcggaaaaatatcgcggcagcaaagcggacgacggcgcgaatgcccagcaggcggagtggcgcacctgggaagtgaaaaaacgcctcgaatattcgctggttaagggcattaccgaatttatcgaacaggacaccgaagaagcgcgtcagcaggccgcccgcccgattgaggtcattgaagggccgctgatggacggcatgaacgtggtcggcgatctgttcggcgaaggcaaaatgttcctgccgcaggtggtgaaatccgcccgtgtaatgaaacaggcggtggcctaccttgagccgtttattgaagccagtaaagagcagggctccagtaacggcaaaatggtgattgccacggtaaaaggcgacgttcatgacattggcaaaaacatcgtcggcgtggtgctgcagtgcaataactacgaaatcatcgatcttggcgtgatggtcccggcggataaaattctcaaaacggccaaagaggtaaacgcggatctaattggtctttccgggctgattaccccatcgctggacgagatggttaatgtggcgaaagagatggagcgccagggctttaccatcccgctgctgataggcggcgcgaccacctcgaaagcgcatacggcggtgaaaatcgagcagaactacagcggcccgaccgtttacgtacagaacgcctcgcgcaccgtcggcgtggtgtctgcgctgctctcggacacgcagcgcgacgagtttgtcgcccgcacgcgcaaagagtatgaaacggtgcgtatccagcatgggcgtaaaaaaccgcgtacgccgccggtgacccttgccgccgcgcgggaaaacgatctggcctttgactgggaaagctacacgccgccggtggctcatcgtctgggagtacagacggtggaagccagtatcgagactctgcgcaactacatcgactggacgccgttcttcatgacctggtcgctggcgggtaaatatccgcgcattctggaagatgaagtggtaggggaagaggcgcagcgcctgttcaaagatgctaacgagctgctggataagctgagcgcagagaaaaccctgaacccgcgcggcgtggtgggtctgttcccggccaaccgcgtgggcgacgatattgaaatctatcgcgatgaaacccgcacccacgtgctgacggtgagccatcatctgcgccagcagacggagaaggttggcttcgccaactactgcctcgccgattttgtcgcgccgaagctgagcggcaaggcggactacatcggcgccttcgccgtgaccggcggcctggaagaggacgcgctggcggaggcctatgaagcgcagcatgatgactataacaagatcatgattaaagccatcgccgatcgcctggcggaggcctttgccgagtatctgcatgagaaagtgcgcaaggtttactggggatatgcggccaatgagaacctcagcaatgaggagcttattcgcgagaactaccaggggatccgaccggcgccgggatatccggcctgtccggagcacaccgaaaaggggaccatctggcagctactggacgtcgaagcccataccggcatgaagctcaccgagtctttcgccatgtggccaggcgcatcggtttccggctggtacttcagccatccggacagtaagtacttcgccgtggcgcagatccagcgcgatcaggtcgaagattacgcgctgcgtaaaggaatgacgccggcggaggtcgagcgctggttagcgcctaatctgggctatgatgcggactagtcgtcatctttccttacaacaaacaaggcgctctgtgagcgccttgtctctttattgaggttaaccccttatactgagataggttcctgaacttcggaaaacctataacgataaggagaagctgattccgtgttaactctgctacacctgttgtccgcggttgctctgctggtgtggggcacgcatatcgtgcgtaccggggtgatgcgcgtctatggcgctcgcctgcgtaccgttctcagtagcagcgtagagaaaaagccgctcgccttctgcgcgggtcttggcgtgactgcgctggtgcaaagcagtaacgccaccaccatgctggtgacctcatttgtcgcccaggatttagtgggtctgatgccagcgctggtgatggtgctgggggccgacgtcgggacggcgctgatggcgagggtgttgaccttcgacctgtcgtggctgtcgccgttgttgatatttatcggggtgattttcttcctcggccgcaagcagacccgcgccgggcagcttggacgggtggggattggtctggggctgatcctgttggccctcgagctgattgtccaggccgtacaccccataacccaggcgaacggcgtgcaggtgattttcgcctcgctgaccggcgatatcatgctggatgccttgattggcgccgtatttgcaatcattagctactccagcctggcggcggtgctgttaacggcgacgctgaccgcggcgggagcgatctctttcccggtggcgctgtgtctggtgattggcgccaacctgggatcggggctgctggcgatgcttaacaacagcgcggcgaacgcggcggcgcgccgggtggcgctgggcagcctgctgtttaagctggtggggagcctgattattctgccgttcgtccatccgctggccgcggcgatgcacaagctgccgttggccgagtccgagctggttatctacttccacgtcttttacaacctgctgcgctgcatcgcgatggtgccctttgccggaccgatggcgaagctgtgccagcgtctgatccgcgatgagcccgagctggataaccatctcaaacccaagcatctcgacccgtcggcgctggacaccccggcgctggcgctggccaatgccgcgcgcgagacgctgcgtattggtgacgcgatggagcagatgctggagagcctgcacaaggtgatgcatggcgaaccgcgtcaggagaaagagctgcgccgcatggcggatgatatcaacgtactttacaccgctattaagctctatctggcgcgaatgccaaaagatgagctggcggaagaggaatcccggcgctgggcggaaattattgagatgtcgttaaacctcgaacaggcgtccgatatcgtcgagcgaatgggcagcgagatcgccgataaatcgctggcggcgcggcgcgccttctcggtagaagggttaaaggagctggacgccctgtacgatctgctgctcagcaacctgcagctggcgatgtcggtcttcttctccagcgatgtgcccagcgcccgccgcctgcggcgcagcaaacaccggttccgcattcttaaccgccgctactcgcatgcgcacgttgaccgtctgcatcagcagaacgtgcagagcatcgaaaccagtacgttgcacctggcgctgctgggggatatgaagcgtctgaacagcctgttctgctcggtggcttacagcgtgatggagcagccggatgaagacgacgaacgggatgactactgagccattccccggcggcgctgtactaaccggggttttgcgtttggacgttccgttgaggcagcccggataaggcgcaatgcgccgctatccgggaaacgttagccacccaggctcagaagcggtggcccgcaggcagggttatcgcttcttcccccggtttgaacaacagcgtcgggttcgggccaccgagcgtcgcgtgaccatcggtgacctggatccagtttccttccggcaaaccaatcaccgttaattccggcgccacgaccagcagttcgcggatacgctgttcgcgggtttcgccctgatgcccggtcggcaacgcgttggtgaagtgcgggttaatctgtagcgggaacagccccagcgcatcaaatccctgcggatcgacaatcggcatatcgttggtggtgcgaatggtcgggcaggcaaggtttgaacctgcactccagccgatatacagcgccccgcgtttgacgacatcgacaatcggcgccaacaaaccgcgactgcggcactctttcaacagctggaaggtgttcccgccgccgacgatcaccatctcggtgctttcaatggcggcgatagggtcgtcgacgctgtggataccggttacgctgaccgccatgggcgccataaccgcagccactttggccgtataatcatcccaggattgcgtcacgccagcgaaggggatgaataccgccttacggcggcctttgacctgaccggcaatcagcggcagggcgtgttccagccaggctttccccggcagcgtggagttactgagtaacagcagttccatcttttcttcctgttttaaaaatattattgaagcagaaattctagcatcgcccccataccgacgcgctgatatggcgcatgatgtgggtaagcggaatgctgttcacaagcccgacgaagcttctggataatgaatcacacaatccaggttttttctcgcccacaaggtagggtatatttcgcttttacaggagaatctatgctgcccgactcatcaacccgattaaataaatacatcagtgaaagcggcatctgctcgcgtcgcgaagcggaccgctttattgaacaaggcaacgtctttatcaatggcaagcgcgccacgattggcgatcaggtgaagcctggcgatttagtcaaagtgaacggacggttgattgagccgcgcgaagcggatgatctggtactgattgcgctgaataagccggtcggcattgtgagcaccaccgaagatggcgagcgcgacaacattgtcgatttcgtcaatcacagcaagcgtatctttcctatcggccgtctggataaagactcccaggggctgatcttcctcaccaaccatggcgatctggtgaacaagatcctgcgcgccggcaacgaccatgaaaaagagtatctggtcacggtcgataagccggtgaccgatgagttcattcgcggcatgggcgcgggggtaccgattctcggaaccgtgaccaaaaaatgtaaggtaaagaaagaagcgccgttcgttttccgcatcacccttgtgcaggggttaaaccgccagatccgtcgtatgtgcgagcactttggctatgaagtgacgaagcttgagcgtacgcggattatgaacgtcagcctgacggggatcccgctgggagagtggcgcgatctgaccgatgacgagctgatcgacctgttcaagctgattgaaaactcctcttccgaagcgaagccgaaagccaggccgaaggccaaagcggcgactcccggcatcaagcgcccggtggtgaagatggaaaatagcaacgataagggccgcccggctggtaacgggaaacgtttcacccagccgggacgtaaaaagaaagggcgttaacgcctgccgcgggtcggcgtattcgccgaccaggaaaaggtcgcttccttatccgttttataagcctgctgttttttcacctggcgggctttcttcgcttccgcttcacgctgcgccatcagcttatcgatatattcctttttcacgctgttcgtttccgcattgctcagcgggcggccatgcgcaatacgcgcgcggtcaagcagcgttttcaattcgcgctgttcgcgctcggtcatctctttttgtgtaatacgggggagtgccatggtggtgccctcagtcagaccagagcacccagtgtacggcaatgaatattttactgatagcctgtatggcaactaaagcaggcacacgcccgggcctgcgcccggacgtatcacgctcagcgcttgtcggcttttttggcgatgggctttcctgaccagtacccggccagcagcgaaccggacaggttatgccagacggagaacagcgcgcccggcagcgccgccagcgggccgaagtaaattttacccagcgcggccgccaggccggagttctgcatccccacctcgatcgccatcgtacggcaggtggattcatcaaaaccaaacagacgtccgccccagtacccgccaagcagaccaatagtgttatgcaggatcaccgcgataatcaccaccaggccgacggaggcgatatgggcggaggaacccgccaccaccgcgctgatgatcgccagaatgcacaccatcgagaaggcaggcaggaacggctctaccgctttcaccaccttcggcagcagatgatggacaatcagtcccagcgcgatgggaatgaccacaatctgcagaatgctgagcaacatgcccatgacgtcgacctgaatatgcgcgtcgacgtacagacgggtgagcagcggtgtcgccacgacgccgacgagggtggagaccgaggagatggtcaccgacagcgccacatcccctttggcaagaaagatcatcacgttggaggcggtcccgctggcgacgctgccgaccagcaccatcccggcggaaagctccggcggcatatgaaacagcagcgccagcagccaggcggcgagcggcatcaccagataatggagaaagatccccgcagcgaccggcgccgggcgcgacaggacgcgtttgaaatcctccagcttcagatgcacgcccataccgaacatgatcagcatcagcagggtggtgacccatgggccaattggggtgaaggtggtgggagtgtaataggccagaacggagagcagcagtgcccataacgggaacagccgcgtcagagttgcgagcatgttgtgttccttgcgatacgcgaaccgggccgcgccatcccgatgggcggcgagcaggtcagctggttgtgttgatgttgttataaaaaagccgggttcgagcccggctataggtattgtttatcgtgctaaggaattttattcaaacaaattatgatgcagcttctgcacaaccttctccgcatcgtcgcccggcaccaggaagcacaggttgtggctggaggcgccatagcagatcatgcggatgttaaacggctcgaggacgccaaagacctctttgccgacgccgcaggctttcgacagctcattgccaatcagggcgaccagcgccagattttcttccacttccacgcggcacagcgaagagagctcggtcagcagcgcctgggtcagcagggtatcgcccgcagaggtcgagccggtggtgtccatggtcagggccacgctcacttcggaggtggtgatcaaatcaactgagatgttatggcgcgccagaataccgaacacttcggcgaggaagccgcgggagtgcagcatattcaggctgtgcagcgtcagcagcgtttgccggcgacgcagcgccagcgcgcggaacagcggcgggttctcggtggttttacacaccagcgtaccgcccgctttaggctctttactggagccgacaaacaccgggatatcgctgcgcacggcaggcagcagggtcgccggatgcagcactttggcgccaaaggtggccatttccgctgcctcttcaaaggcgatgacgtcgatgcgtttcgccgccggcgcgacgcgcgggtcggtagtatagatccccgggacatcggtccagatatcgacgcgggtggcattcagcgcttcgccgagcagagcggcggtataatcgctgccgccgcggccgagggtggtggtgcggcctttcgcttcgctgccgataaagccctgggtcaccaccaggccttccgccaggcgcggcgccagctgctgctgggtcagttcggcgacggcggcgatgtccggttcggcgcggccaaagcgatcgttagtgcgcagcactttacgggcgtcaaaccactgcgcctgaataccgcgttcacgcagaatttccacaaacagcagggtggacatcagttcgccatggctgaccagttcgtcggtcagggcggttgaggaggcgagcgcggcggcttccgccagcgtcgtgatattttccagcaagcgctcaatctcttcgcggatcacgttgggataacgcaaacgctccagaatattgaactggatctgacgcagagcgtccagctgggaaaaacgttcggtgggttccagccctcccgctaaggccaccagaatgttggtcacgccggcagaggcggagagcacaacaatacgggtattggcatcgagcagcgccacatcgatgctgcggttcattgcgtcaaaatcagcaacgctggtgccgccaaatttggcgacgactagatctgtcataacaacctcgtgtcagggggcctgacttattaaaacgattcctgagcaccgatcctggcaggggctggacgccgccggatcgcaacaaaatgtcttaataagccaggccaaattattcagccatggcacaagggaagagcgataaacagggtggcgcagagtgataaacaactacgatgtcacccagaagtgctccaccttgtagacccgactcaccgctttgggcgctgaggtgttcgggtatgaaacgcccgactgcgaacgtttctggtgacaacccaggggattcagcccctgtggccggcgaggagcgtgaccagacgctctttcacctcggcgttgctccccctcacgtatcttccccggactggttcctccaatacggttacctgggcaacgcacctcttctggcaattactgacgtctttcacctggccgggggaacagggacattatatcccccgcgaataccctttcgctgtagcgtgaaatgcgcgagcaatagatacctaccaatacgtaagcactgcggatatataaaggcttaacgccagctatgtcaacgctgcggttatgcggatttttcatgcctctgcggctaacagaaaaaagccttatgatagctatactaatggggctttttactccgttttgacccgattcctgaccggcgtcagggtcaagtcacaaaaatcatcacaattttccgtcaccggcgctacaatcgaccgaagtcacaatctcaaatcagaagagtattgctaatgaaaaacatcaacccaacgcagacctctgcctggcaggcattacagaaacacttcgacgaaatgaaagatgtcactatcagcgagcttttcgccaaagatagcgaccgtttttctaaattttccgcgacgttcgacgatctgatgctggtggacttctccaaaaaccgcatcactgaagagacgctggctaaactgcaggatctggcgaaagagactgacctggcgggcgctatcaagtcgatgttctcaggtgagaagatcaaccgcaccgaagaccgcgcggtactgcacgtcgcgctgcgtaaccgcagcaatacgccgattgtggttgatggcaaagatgtgatgccggaagtgaacgctgtgctggagaagatgaaaaccttctccgaagcgattatctccggtagctggaaaggctacaccggcaaaccgatcaccgacgtggttaacatcggcatcggcggctccgacctcggtcctttcatggtgaccgaggcgctgcgtccgtataaaaaccacctcaacatgcactttgtctctaacgtcgatggcacccatatcgccgaagtgctgaagaacgtgaatccggaaacgactctgttcctggtggcgtccaagactttcactacccaggaaaccatgaccaacgcccacagcgcgcgcgactggttcctggcaaccgcgggcgacgacaagcacgtggcgaaacacttcgccgcgctttccaccaacgcgaaagcggttggcgagttcggcatcgacaccgccaacatgttcgaattctgggactgggttggcggccgttactccctgtggtcggcgattggtctgtccatcattctctccgtgggcttcgacaacttcgttgagctgctgtccggcgcgcatgcgatggataagcacttctccaccactccggcggagaaaaacctgccggtgctgctggcgctgatcggcatctggtacaacaacttcttcggtgcggaaaccgaagcgattctgccgtacgaccagtacatgcaccgctttgccgcttacttccagcagggcaacatggagtccaacggtaagtatgttgaccgtaacggccacgcggtagactaccagactggcccaatcatctggggtgagccgggcaccaacggtcagcacgcgttctaccagctgatccaccagggcaccaaaatggtaccgtgcgatttcatcgctccggctatcacccacaacccgctgtctgaccaccatcagaaactgctgtctaacttcttcgcccagaccgaggccctggcctttggtaaatcccgcgaagtggttgagcaggaatatcgcgatcagggtaaagacccggcgaccctggagcacgtggtgccgttcaaagtgttcgaaggtaaccgcccgactaactccatcctgctgcgtgagatcaccccgttcagcctcggggcgctgattgccctgtacgagcacaaaatcttcacccagggcgcgatcctcaacatcttcacctttgaccagtggggcgttgagctgggcaaacagctggctaaccgcatcctgccggagctgaaagacggcagcgaagttagcagccacgacagctctactaacggcctgattaaccgttataaagcctggcgcgcataacgcttgcgcagctaagacggaatgccgaccctttggtcggcatttttatttatagccgccgcagcagcctcgccggattccccgcccacacgcctttctcggtaatggacttcgttaccacgctgcccgcgcctatcaccaccccatcgcagatgctgacggccagaatcgtggcgccgctgccgatcgacacgtcatcgccaatctcgatccgcccccagctggcgcggtcggcgtttggtttaccctcgcgaaacaggtcgttggcaaacatcacgccgtgaccgataaagcagcgctggccgatggtgacgtactcgcagataaaggtatgggactgaattttactgttcgcgccgatgcgggtattcccctggatctcaacgaacggcccgacgaagacgttatcgccgagctggcaatcatagaggttggcgggctggtaaataacgacattttccccacaaacgacgttacgtacgccggtatcacgaagctcaggcatagttcctctcaaatcggtttggccagaatatgtaaggtgctttgctggctggcggagtggaaaatcgtgtctctgatgtgcttcatcccctggcgttcgtaaaaacggcgcgcggcgggattcgcggcgagtacttccagccacagccaactttcaccggccgtttttgctcgcgtctcgacggcgtgaaaaatatgctcgccgtagcggtggccagtcttccccggcatcaggtagagcttatgcagcagcgtaccaatcttgccgtcgtcagccattcgctgctgatagctatatttagcgaaaccaacaggagagggggcttcggcgatgagccagtgttgggtcgcatccgcaagactccgacgtagcgcatcttcggcatattcttgcttaagaaataacgccagttcatcggcatcgcgccagagatgagcaaagtggtgatgatagctggcatagcccatcgcgctaagctggggcgcgtcctcgggacatgcctgtcgaatagttaacatgctgcgttcctcgcgtcgttctgcggctatattgcctgtaaagtgaacaatgtggaacgacaaaaatcggtgggagaaggctggaggcgctccctccagcctgggggttagcgggcgaaagcgatcgcttcgatttcgacgccggcatctttcggtaaccttgctacctccacacaggagcgcgccggaaaggccgcctggtgttcgataaagaaggcctcgtaggcggcattgatggcggcaaaatccgccaggtctttgacaaacaccgtagttttaacgatctgcccgaccgtgagtccggcagcttcaacgatggctttcacattttccagtgattgccgcgcctgttcggcaatgtcctcgggcatggtgccgtccagcggattaatcggcagctgaccggaggtgatggtcatcgcgccgagattgacgccctgcacgtacgggccgatagcggcaggcgcgtcagcggtggtaataatcatacggtttatccttcaaacggttacataaaataatttaacaacaccagcgagccgacgccgctcactaccacccacaccaggcctaaacggaagctggcgagcgtgcagatgatggcggcgatcaccttcggattttttaagtcgaactccatgctggaattcacgctcaggatctgaatggtgatgatggccggcagaacggtgaccggcacgaagcgtagcgttttggtcacccgctcggacatctggatcttgccggccaggccgataaacgagaaacggatgagaaaagtcaccgcggccatgcccagcgtcagggcgataaaatagctattactcattttccatcgcctccactaacggcatatcggattcggtttttgccatctgcttgcgctcttccgccaggtcgacgcacaggccggcgaggacgccaagcactgaggcgacgacgatacccagcgaatagggtaggaccactaacagcacgccggaaacggcggctacaaccgcggcgacggtgcaggcctggcttttaatttgcggcaccacgatggcgataaaggcggcgaccatggcgaaatcaagaccgtatttctcaatgtggggaaacgaggcgccgaccagcgcgccaagaaaatcagccagcacccaaatcgcccagaaggtaatcatcgccgaaccataaaacagatatttttcctttttatttccttccatctctttgacggtggtggcatacacctcgtcggtgagcgcataggacataaagcattttttaaagaatgaagcttcgcgcacggtgccggaaatagaggcgctatacagcacgtggcgaagattgataattaatgtggtgaaaataatcacgccgagcgtggcgccggtttttaacatattcagtgccagcatttgcgccgagccggcaatgacgatcgccgaccacgccgtactctgccagacgctcatgcccgcgctaacgcttaatgcgccgacaataaatgaaaatggaaagtcgccgatgcataggggcataatagcgctggcgccgcggaagatgacttttttattcatctgctatacctgctaatttataaataatagtgtgggtagagtacgttaatcggggcctgctctttcaggcccgtgaaatggtattatttagcgaccataatgctgataatttctttatcggtgagagtcattggtttaatcaccagacggcacaggttattaatagtctgctcgacatcggcgcagacaataccgtcattggcgccagcgcagctattttgcattgccattagtaccgccttaaaggcgctggataccactgacgagactttcatcgcgcagctgttggaagcgccatcacaaatcatgccggtaatatcgctgaccatattaataattgcggtattaatggtattgatgtcgcgggtaaacagccaggccataccggcggcggcgcccatagcggcggttgaggctgcgcatagcgcagataagcgcgtataacgagaatgaattgagattgcggtgagatgagagagagacaaagcgcgagccagggtctcttcatcgacgccgagatgctctgcaaccaccactaccggcatggttgctgtaatgccctgattgcctgagccgaagttagacatcgctaccaccggcgcgccgcccatgcgggcatctgaagcggcgacggtgttgatgatcaccttgcttaacagatcgttgctcatcaggccgtttttcactgcgtcagaaaaggtaccgttaatgttcaggccatatttttttgttttgccttctgccgccagcgcggagtttaagcgcgcggcgtcgagaataaagcgaatatcattaaagtcgacgcgattaataaattcgtaagcctgttgtagcgagaaagtgggcagcgtttcgcgctgggtgcgcgtattctgtttttcgcttaatggctgcggctggccattaatataaagttcgaccacgttggtgtgggttcctttgaccacgacacgacagcaattctcgccagcagagagggttaaatcgagatggataaaatccggggtctcttcgacggcaatatcaacggcgttattggcgatcagcttctgcgccatttcaacgtgtcgcggagtgatatcttccagcgtttttaatcccttttgcgggtcgccgccaaatgcgccaattgcggctgccagcggtacaccgcaaacggtggtgccgggtatggtgacgcccatcgcgtttttataaagattggcggaaataaaaccgctaattttagtgcaaggctgatccagatattgtgcggcgtaggcggccgcgaaggaaatagcgacgggttcagtacaacctaaagccggggcgacctcttgtttgagccattttacgtacagggaagcgttatcggtgttcataatgatttaatgtccaaaattaaattttattcagctgcgataatgctaagacaaaagataagaaaaaacttaccctaataaccataaaaagactgtggtttggagaaaaattttatcttacgggaggttttaagatatacctgtttcaaaaagtaaactttttatatttcagttagttgggctgattcgttctaagcgtaatggatgattttgttaatctgctcacagcgttgctggaaggacaattttctcttgttcgtacttttcgaatcaatagcccggagatagcgtaagacgaatgaatcataggtagatctggatcacacttttgcgctatacagatcgacaacgttcatgcatttgaggtgtcactatgccgtcggtatatcgtccgctggttaatttcgttgcgaaggccatgcaggccgtgctgaatctggcactgctgtgcctgggaattattctggtggtgttcctgggaaaggagaccctgcatctggcgcacgtactgtttacgccggagccggtgagtaagtacaagctggtcgaagggctggtggtctattttctctactttgagtttatcgcgctgattgttaaatattttgaatccggttttcactttccactgcgctatttcgtctatatcggtattaccgcaattgtgcggcttattatcgtcgatcatgagtcgccgctggcggtgctcatttactccgcggcgatcctgatcctggtgattacgctctggctgtgtaactccaatcgcctgaaacgcgaataaaaaaaagcggcctccagggccgctgaccaacagtcacaaatagaatttatgtagggtccagttgaggatagcagtggcattgaccttactttttcagctgagggcgacggcgacaatacccggttggggtcgtgtattgcggctagaccgtcggccctcctctgaaatttggggccggtgttacaaaaaaattaacctttcactccacccgccgtcaggccattaaccagccagcgctgcgccagcaggaagacaaccgtgatcggaatggcggagagcaccgccgcggcggcaaagtcgccccacagatagttctgcgggttgagatactgttgcatacctaccgccagggtatagctgttcacatcgcgcagcagcagcgaggcgaccggcacttcggtgatggccgcgatgaacgacagaataaacacgactgccagaatcggcaccgacagcggcagcagcaccagacggaaagcctgccatggggtcgcgccatccagcgccgccgcttcttccagcgagccatcgatggtttcgaagtagcctttaatcgtccagacgtgcagcgcgataccgcccatgtaggcaaagatgacgccgccgtgggtgttgaggccgacgaacgggatgtactggcccaggcggtcaaacaacgcgtacagggcaaccagcgacagcaccgccgggaacatctggaaaatcagcatccctttcagcagggtcgctttccccgggaagcgcatacgggcgaaagcgtaggcgcaggtggtggagagagcgacgataccgatcgcggtgatcccggcgaccttaatcgagttccacagccacagcaggaccgggaacggcggcggcgtgacgcggccatcggcgtgttcgacgctgaagcctaacgccagacgccagtgctcccaggagatggtatccgggatcaggctgccggtggcgaagttaccctcgcgcagcgagatggcgataaccatcagcagcggaaacataatcgcggcgataaaaatcagtagcaggagatgcgtggtaaataaacgtagcttctgcgatttgggttggaccatagccattatcgttatctcccttaatcaaacttcatgcgcgtggctttcagattcacaatcgctaacgcgccaaccagcaggaagattagcgttgcgatagccgccgccaggccgaagtcctgaccgccgccgccttcaaaggcgatgcgataggtgtagctcaccagcaggtcggtataaccggccggggtggtggtgccgagacggtccggaccgccgttggtcaacaattgaatcaggacgaagttgttaaagttaaaggcgaagctggcgatcatcagcggcgttagcggcttaatcagcagcgggaaggtaattttaaagaagttctggaacgggccggcgccatccattgccgacgcttcgtacagatcgtccggaatcgccttcagcagccccatgcacaggatcatcatgtacgggtagcccagccaggtgttgacgatgatgatcatggtgcgcgcggtggtcgggtcgctaaaccaggccggcttaatgccgaacagcgtgctgagcatcatgttgatttcaccaaagctctggttgaacagccctttgaaaatcagaatcgaaataaacgacggtacggcgtacggcagaatcagcaggacgcgataaatcgctttgcctttcagcgcttcccactgcaccaggcaggcgaggatcatccccaccgcgacggtcagcaccacggtcagcaccgagaacaccaccgtccagacgaagatcgcaaagaacggtttctgaatgccttcatcgtggaagacgcgggtaaagttgtcccagccgatagtcacagtgtagcccgggctcagcttctcattgccccagctgccgtcggcgttaattgactggtagaagccgacgtcgttgttcgggcggtatttaacgtgggtctgattgttggtcagtaccccgtcttcgccgagggtatacagaggctgggtaccggagaactggcgcagggagctcatgatgactttgctgtcatccggcagcacagcggtcagctggttcagcgcggtgcgattctgggtaatcacgcgcaggttggcgcgctcgccttccggcagggcgtcggtttcttttaacgccagcttctgctcgccgccaaatttaaaggcgtcagaaaggtagtttttaccgctttcgccgtcggtcagcgccagcttccactcgtcacccgcagggatcagcgtgaaattataggctttgccggcctggaaggaacgatccatcagcacctgctgcgcacgctcaaaggtcagctggttggtgctgctgtagttggtaaacgcgatagcgatagtgcagatcagcggaaacaggacaaacaggcccatgccggcgaggccgggataaacatagcgccaggcataagccttgcgattagcgaaaatatacaggccaactgagcttaaaattagcgtcatgatggcgaacaggtactccccctgggcgtacatcaaaacaacaaggtaacccaccagcaggcacagtaagccaatcacagaccatgtgagttgcgggctttgccaccagtgtctctttttaacggcatccatggggatcatcctctacagcggtgaaaacttatttgtcaggtggcgcttcgcttacctgacctacggtccgagccgtagtggtagggcgggtaggcgcacgcgccacccgccgttttcttacttagtgatacggctctgtgcatctttcagcgcagcatcgacagtctggcgaccgctggcggcgttgataaccgcggtacgaacggcataccagaaggcagacatctgcgggatgttaggcatgatttcgcctttctgggcgttcgccatggtggcagcgatgcgcggatctttttccagtttttcctggaaggatttcagcgccacggcacccagcggtttgtcgttgttaacggcttccagaccctgatcggtcatcaggtagttttcgaggaactctttggccagctctttgttcgggctggcggcgttgatccccgcgctcagcacgccaacgaacggtttcgatggtttgcctttaaaggttggcagcagggtcacgccgtagttaaccttgctcttatcgatgttagaccacgcccacggaccgttgatggtcatcgcggtttcgcctttgttgaaggccgcttccgcgatggagtaatcggtatcggcattcatgtgcttgttcttgatcaggtcaaccaggaaggtcaggcccgctttcgcgcctgcgctgtccacgccgacgtctttcacatcgtacttgccgttttcaaacttgaacgcgtatccgccgtcggcagcgatcagcggccaggtgaagtacggttcctgcaggttgaacatcagcgcgctcttacctttcgctttcagttctttatccagcgccgggatctcttcccaggtcttcggcgggttcggcaccaggtctttgttgtaaatcagggacagggcttcgactgcgatcgggtaggcgatcagtttgccgttatagcgaaccgcatcccaggtgaacggatagagtttgtcctggaacgctttgtccggggtgatttccgccagcaggcccgactgcgcgtagccgccgaaacggtcatgcgcccagaagatgatgtccgggccgtcgccggtcgccgcaacctgcgggaatttctcttccagcttgtccgggtgttctacggaaactttaatgccggtgtctttttcaaactttttacccacttcagcgaggccgttgtagcctttgtcgccgttaatccagataaccagcttaccttcttcaatttttgcgagggcagaggcggaaaacatcatcgtggtcagtgccgacagcgcgaggatgcgagcgccagttttgattttcatatacccgtcctttttggtgttgtactcgtggatacacttcggtggcttaacgatgatgagtttccttttttaacaacccctttccatcctccccaggtctacgccccacccgctggttgtgtgatctccattgcaaaaacggccgtattgcgtcctggagcacagaaaaaagcgcccaattttgtcgcctccatcacgaaatcacgctccgcccgccatcccccgcggcgagagccaatctctcatcctcccatctcctcccccataaaaaagccggggggtggaggatttgcctgcgtaatgaatgccgcatagtcgacccatcttgaatgtgactgttagtgacaggttgtaacgaagggagaagggcatggcgagcgtacagctgcgaaatgtaacgaaagcctggggtgacgtggtggtatcgaaagatatcaatctcgatatccacgaaggggaattcgtcgtgtttgtcgggccatcgggctgcggcaaatctaccctgctgcgtatgattgccgggttagaaactattaccagcggggacctgtttatcggtgacacccgcatgaacgagatcccaccggcagaacgcggcgttgggatggtattccagtcttatgcactctatccccacctttccgttgcggaaaatatgtcgtttggcctgaagctggccggcgcgaaaaaagatctgattaaccagcgggtgactcaggttgcggaagtgctgcagctggcccatctgctggagcgtaaaccgaaagccctctccggcggtcagcgccagcgcgtggcgattggtcgtacgctggtggcagagccaagcgttttcctgctggatgagccgctttccaacctcgatgccgccctgcgcgtccagatgcgtatcgaaatctcccgtctgcataagcgactgggccgcaccatgatctatgtcacccacgatcaggtggaagcgatgaccctcgccgacaagatcgtggtcctcgacgccggccgtgtggcgcaggttgggaaaccgctggagctctatcactatccggctgaccgcttcgttgccggcttcattggttcaccgaagatgaacttcctgccggtcaaagtcaccgcgacggctatcgatcaggtgcaggttgaactgccgaaccgtcagcaaatctggctaccggtggacagcgccaacgtgcaggcgggcgccaatatgtccttaggtattcgaccggagcatttattgcccagcgatatcgccgatgtaacccttgaaggcgaggtccaggtcgtcgaacagctcggtcacgaaacgcaaattcatatccagatccccgccatccgtcagaacctggtttaccgccagaacgacgtggtgttggtagaagagggagccacattcgctatcggtttgccgccagaacgttgccatttattccgtgaggatggcaccgcttgtcgtcggctgcataaagagccgggcgtgtaaggcttcccattaaaaaagcgcgaacccggctggcgatataccggcgaagcgtgcaaagaaaagcaatgatctcaggagatagaatgatgattactctgcgcaaacttcctctggcggtcgccgtcgcagcaggcgtgatgtctgctcaggcgctggctgtcgatttccatggctacgcgcgttccggcattggctggaccggcagcggcggcgagcaacagtgcttcaaagcgaccggcgctcaaagtaaataccgtcttggtaacgaatgtgaaacctatgcggaactgaagctgggccaggagctgtggaaggaaggggataagagtttttatttcgatactaacgttgcctattccgtgaatcaggaagatgactgggaaagcacctctccggcgttccgtgaagccaacatccagggtaaaaacctgatcgactggctgccgggctccacgctgtgggcgggtaaacgcttctatcagcgtcatgacgttcacatgatcgacttctactactgggatatctccggcccgggtgcaggtctggaaaacgttgaccttggcttcggtaagctctctctggccgctacccgtaactcagaaagcggcggctcttatactttctccagcgatgacaccaaaaaatatgctgcgaaaactgccaacgacgtctttgatatccgtctggcgggtctggaaaccaacccgggcggcgtgctggagttaggggtcgattacggccgtgctaacccgcaggatgactatcgcctggaagacggcgcgtcgaaagacggctggatgtggaccggtgaacatactcagtctatctggggcggcttcaacaagtttgtggttcagtacgccactgacgcaatgacctcctggaacagcggccactctcaggggaccagcatcgataacaacggcagcatgatccgcgttctggatcacggcgcgatggacttcaacgatgactggggcctgatgtacgtggcaatgtaccaggacgtggatctggacagcaagaacggttctacctggtacaccgtgggtgtccgtccgatgtacaaatggacgccgatcatgagcacccagctggaaatcggttacgacaacgtgaaatcccagcgtaccagcgaaaacaacaaccagtacaaaattactctggctcaacagtggcaggcaggcaacagcgtctggtctcgtccggctatccgtatcttcgcaacctacgcgaagtgggatgaaaactggggctacagcaacacctccggtctgcagacgaaagacagcagcggaagcggcgcgttcacctccagccgcggtgacgacagcgaagttaccttcggtgcccagatggaagtgtggtggtaataccgtccgcaggacgggtgtaacctgggaggggcgtcagcccctcctgattattcagggttagcgcgctattgcctggctaccgctaaaccgatgctatccaaggtgagaagaatgaaaatgaagaaaactctcgtcgctctgtgtttatccgcagggatgttggcatgcgtgccggggatgagccttgccgatgttaactttgtaccgcagaacaccagcgccgcgccggctattccagccagcgcgctgcagcagctgatctggacgcctgccgatcaatcaaagacgcagagcgttgatttaaccaccggcggtcaacgcctggatgtcccggggatcgtcggaccggtcgccgcctggagcgtgccggccaatatcggtgagctgaccctgacgctcgacagcgaactgaacaaacataagcagatttttgcgccgaacgtgctgattctcgaccagaacatgacgcccgcggcgttcttccccagcaattactttacctatcagcagccgggcgtgatgaccgctgaccgcctgggcggcgtgatgcgcctgaccccggcgctgggccagcaaaagctctatgtgctggtgtttaccactgaaaaagatctccagcagaccacgaccctgctggatccggcgaaagcctatgccaaaggcgccggcaatgcggccccggatatcccggatccgatcgctaaacataccaccgatggcgtgctgaagctgaaagtgaaaactaatagcacttccagcgtgctggtagggccgctgttcggctcctccggcccgggtccggtaaccgtcggcaacaccgcggcgccggtagccgcgccagccgccgccgcggcgccggccgccaaaagcgaaccgatgctcagcgataccgaaacctacttcaacaatggtattaagcaggcggtgaaacaaggtgacatcgacaaagccctgaaattgatgaacgaagctgagcgcctcggctcgaaatccgctcgttccacctttatcagcagtgtaaaaggcaaggggtaatcgtctccccacaatgctgatgtttaggcacagcctttaggtgcatcctccgggatgcacctttttttgcacgcgcggcagcctgttgcatggctgttgcgtgaatgatcgtatattgacgtttgcccgccaccaaccgcctattctgcgatacaatgctttcacgttatgtaccggagaatcaggcatgtcccatcctgcgcttacgcgactgcgtgcgctgcgctattttgccgttatgccatccctgccgccgccgctaagtgactggctgctgctggaggactcaatgacccagcgctttgaacaacaaggaaagcaggtcaccgtgaccctggttaacgaagggtatatcggccgtgacgcgctgactgacgaagcggcgctgctgcccgacgaaccgcgctactggctgcgggagattatactcaatgccgatggcgagccctggctggccgggcgcacggtggcgccggagtcgacgctgtgtggtccggagctggcgctacagcagctcgggcaaactccgctgggccgatacctgtttacgtcgtcgacattaacccgcgattttattgaaattggtcgcgatgcagcgctgtgggggcgtcgttcccgcctgcggctgagcggcaaacccctgctgctgaccgagctttttttgcctgcgtcgccgttgtactaagaggaagaaaaaatggagtggagtctgtcgcagaataagctgttggcgtttcatcgcctgatgcgcactgacaaaccgatcggcgctttgctgctgctgtggccgacgctgtgggcgctatgggtggcctcgccgggcgtcccgccgctgtggatcctggcggtattcgtcgccggcgtctggctgatgcgcgccgccggctgcgtggtgaatgactatgccgaccgaaaatttgatggtcacgtaaagcgtaccgcccgccgtccgctgccgagcggcgatgttaccgagaaagaggcgcgaacgctgtttatcgtgctggtgctgctctctttcctgttggtgctcaccctcaacaccatgaccattctgctgtcggtggcggcgctggcgctggcgtgggtctatccgtttatgaagcgctacactcatctgccgcaggtggtgctgggcgcggcctttggctggtcgatcccgatggccttctcggccgtcagcgaatcgctaccgctgagctgctggctgatgttcctcgccaatattctgtgggcggtggcctacgatacccagtatgcgatggtggatcgcgatgacgacgttaagatcggcatcaagtcgacggcgatcctgtttggcgaaaacgatcgtctgattatcggtatcctgcaggtggccgtactggcgctgatgggcgcggtgggttggctgaatgggctgggctgggaatattactggtcgctgttcgtggcggcgggtctgtttggctggcagcagaagcttatcttcaatcgcgaccgcgataactgcttcaaagcgtttatgaacaataactacgtcgggctggtgctgttcctcggcctggcgatgagctacctgtaacctcctgtccgctgccccccggcattccggggggcagcaaacgccgcgttacgcgtcgtcctgcgtgacgctctcaatggtcagtcggacatccgacgtaatcaagtccgccagcatccgataaaccttcagggtctcttccggctcggcgtcgccggtgtcgctgatatagccttcatcgcgcagggtcaacaccagggtgctgaacaccgctttgtcgaagaactccggcgcattgatgccgtgtagcaccgacagacgctgggccacggtgcgactctctttttccagcgagctgcggttgatcgccgggttagcgctcagcagccagaaggtgatggcatagcgctgcagcgtctcgcgggcgccagcggccagcagctgcagggagcgagagtgcgacgggttgaggctcatgacatcgccatcgacgacgatcagctcctgacgcagcatctcggcaatcagcgcatccaccactccggccagctccgctttttcccagcgcaggaacagctcggccttgaggaacggatagagtgtttccacatgacgcagcacttcggcgcggctgagatgacgatgctgagtcaccagagcggctaacagcgacggcatcaccagcatatgggcgatattgttgcgatagtaggtcatcagcaccgcctgctcgcgcggcaggatgatgatgtcgccaatggtgtccttctccacttcgaacttgttcatctgcagcgcatgatcgatgagctcgctggccgaagcggatggggcggtcgcatccggagaatagggcacattgcgcagcagcgcgaggtagcactctaactgctgggtgagctgctcacgggtcagcgaacgctggcgggaggccagtagcgccgtacagcacaggttcatggcgttggccgcgccggcgttattgatgcgcaccatcaggtcagcggcgatgctattcaccgtcggcgtcagccaggaggggcgaaccgcttcgatcgggtcgatcgcttcccgccaatccggcacatgctggttaagataggtcatcagcggcagcggttcgccgaagttaacgtaaccctggcccaggttgcgcagcttgcttaaaccgcgcaccatctgcggcagactctctttctctttagtggcgccgcgcagctctttggcgtaggttcctacctccatcacgtgctcatagccgatgtaaatcggcaccagggtgatcggtcgggttccgccgcgcagcatcgcctggatggtcatcgacagcgtaccggtcttcggatcgagcaggcggccggtacgggagcggccgccttcgacgaaatactccacggaatagccgcggctgaacagttcgccaaggtattcgcggaacacggtggaatagagcttgttgcccttaaaggtgcggcgaataaagaaagcgccgaggcggcggaagatcggtccggccggccagaagttgaggttgatgcccgccgcgatatgcggagggaccagcccctgatggtacaggacgtaggagagcagcagatagtccatgtggctgcggtggcaggggacatagacaatttcatggccgtcgtgcgccagctggcgtacgcgctcggcgttatgcacgttgatgccctggtacaggcggttccaggtgaagccgagaatgcggtcggtcaggcggatcatctcgtatgagaagttcgccgcaatctcttccatcagcgcgatagcgttctgctgtgccttctcgtgcgaaattttcttgctgcgcgcttcgtcttccaccgcgcgggcaatcgctttcgaggccagcagtttattaaacagatcctggcgggccggcagacgcgggccgacggcggccagccgctggcgggcaaaatgcatgcgagcgacgcgagccagcttctgggcgatgatcttatcggtaccgtgctcatccgccatgcggcgcagcgaaacggacggcgagaagcgcacgaaactgtcgcggccgagccaggagacggcgaaaaatttctgaatgccgttcagcatccgcagcggcggattgacttctcctttctcgcgacccggcgaacggccgaacatgaccgaaaccggcaccatttgcacatcgaggtccggatggttgcggtgcagatcgaggtaatcgtggaacagcttgatggactcttcttttggcgtgtaataagtaaatacgcgcggcccaccgtggatgaatacgtaacgcggcagcagggcgccgtcgatttccagcggttcaagcgggtcaggtaaatcatgcgccaggcattgggcgcgcagcgtcagcaggtccgccttcgaattatagggcaggacgtacatgaccggacgcgaggtatcgagtcctaattcctgggcaggctctgccggaatagacttgctttttaccagcacctgtaatggtaaattcagtaatttatagtaaattcgttgccagccggacataaacgatgtgaagcctctggttaatcatgcaaatgcgcggcaagaataacagaaagtgggcaaaatttccgttaccacgcggcaaacgcgcacactcatcgacgtcatttacgtaaaaaggttttgtgatggccaataataccaccgggttaacccggatcattaaggcggcaggttactcctggaaaggatttcgcgcggcgtggatcaatgaggctgcgtttcgtcaggaaggcgtcgccgctatcgtggccgtcgcggtagcctgctggctggacgtcgacgccatcacccgcgtattgctgattggctcggtcctgctagtgatgatagtcgaaattctcaacagcgcgattgaagcggttgtggaccgtatcggctcggattttcacgagctttcagggcgcgccaaagatatggggtcggcggcggttctgctggcgattatcatcgcgctgatcacctggggaacgctgctgtggagccattatcactaacgttcttcgctaaccctcgcaaaatatgaacaatccgccgatttttgtgtgccatgtggttccaaaatcaccgttagctgtatatactcacagcataactgtatatacacccagggggcggaatgaaagcgttaacgaccaggcagcaagaggtgtttgatctcattagggatcatatcagccagacgggcatgccgccgacgcgtgcggaaattgctcagcgcttggggttccgttccccaaacgcggcggaagaacacctgaaagcgctggcgcgtaaaggcgcgatcgagatcgtctccggcgcttctcgcggtattcgcctgctgacggaagaagagcaaggcctgccgctgatcggccgcgtcgccgccggtgagccgctgctggcgcagcagcatattgaaggccactatcaggtcgacccgtcgatgtttaagcccaacgccgatttcctgctgcgcgtcagtgggatgtcgatgaaagacatcggtattctggatggcgatttgttggcggtccacaaaacccaggatgtgcgtaacggccaggtggttgtcgcgcgtatcgatgaagaagtgacggtgaagcgcctgaaaaagcagggcaatgtcgttgaactgttgccggaaaacagcgagttttccccgatcgtcgtcgatctgcgccagcagagttttaccattgagggtctggccgttggcgtgatccgtaatggagaatggctgtagcgcctgcctctgcgcagcgtcatctgttgcgtgacgctgcgacgtttttcctcaatcaggtcctcaaacatgctgctcaacgctgccgataaagcgctgtggcgtcttgccctccctatgattttctccaacatcaccgtcccgctgctggggctggtggatacggcggtgatcggccacctggacagcccggtatacctcggcggcgtagcggtcggggcgacggccaccagtttcctcttcatgctgctgctgttcctgcgcatgagcaccaccgggctcaccgctcaggcctggggcgccaaagatccgcagcgcctggcgcgggcgctggtgcagccgctggccctggcgctgggcgccggggtgctgattatcctgcttcgcctgccgctaattgacctcgctctgcatattgtcggcggcagcgaggcggtgcttgagcaggcgagacggtttctcgaaattcgctggctcagcgcccccgcctcgctggccaacctggtgctgctcggctggctgctgggcgtccagtacgcccgggcgccggttattctgctggtggtgggtaatctgttgaatattgtgctcgatctgtggctggtgatgggcctgcggatgaacgtccagggagcggcgctggccacggtcaccgcggagtacgccaccctcattattggcctgctgatggcgaagcgggtgctgacgctgcgcggcgtgtcgctggcgatgctgaaaaatgcctggcgcggggatctgcgccgtttattggcgttgaatcgggacatcatgctgcgctcgctgctgctgcagctgtgctttggcgcgctgaccgtattcggcgcccgtctgggcagcgacatcgtggcggttaacgccgtactgatgaccatgctgacctttaccgcctacgcgctggatggctttgcctatgccgtggaggctcactccggccaggcctacggcgcgcgcgacggtagccagttgctggaggtgtggcgggcggcctgccggcagtccggcatggtagcgctggcgtttgccctgatttacagcctggcggggcagtacattatcgcgttgttaacctcactgccttccctgcagcagctggccgatcgctatctgatctggcagacgctcctgccggtggtcggcgtctggtgttatctgctggacggcatgtttatcggcgcgacgcgcggcgctgagatgaggaacagtatggcggtcgccgcggcggggtttgccgtgacgctgcttacgctaccggtgcttggcaaccatggtctgtggctggcgctggcggtgttcctcgccctgcgcggcctgtcgctggcgctgatctggcgtcgacactggcgacgcggcacatggtttagttagttatctcccgtcattgccgctagccgtgaccttccccggtcgcgctacgcttacagggcgattcaatagcccggctcagcgtggcgcaagccgggaacatcctcttcgcgttatcccgcggtgcgatggttaaaaattccgaataacgaatcgacgccagcattctcatctatagttaataccatgtccggcacaaaacgggctgtaaacccaccgaatgatgaggacgttattatgaataaagacgaaatcggcggtaactggaaacagtttaaaggtaaagccaaggaacagtggggcaaacttaccgatgatgatatgaccgtaatcgaagggaagcgcgaccagctggtcggcaaaattcaggagcgttacggctatgagaaagatcaggctgagaaagaagtctcagactgggagcataagaacgactatcgctggtagcgttccttgatccgaagaatgaagcatttgtgttagtgcctgtctgaatggcgcacggacgcgccgttaaccctttttcccgctgcggcagccgctcagcgggctttctttttgagctgaatagtatgatcatgctggcagtgtcccggggtgctgcaggcttcgacttccacgcagcccgcgcaaagcccgtgagcttctatcacattgtggcgcagggcaaaccccatgcgggccgccagcgtatgcatgatatcttccaccccttccgccgcttcttcttttaccacgccgcagcggtcgcagataaacatggccgagctatgggtcggctggtcgaacagatggcacagcacatagctattggttgactctaccttatggacaaaaccctgctcgagtaaaaactccagcgcacggtaaaccgtcggcggcttcgcctgcggctctttctcacgtagcaagtccagcagatcgtaggcgctgattgccccttgctgcaggctcatcaggcgcaacacttccagacgctgtggagtcaggcgtacgccgcgctgtgcgcaaagcttttcagcatgcgctaacatctcttgcgaaggggtcttatccatgagcatcctcgggttgcgtgaatttgaatctgttactttatcacgttcctcagaaaacaccgagagccggcaggtgatacgggtcatacttcaggttgtcggcaccggcgcccgtcccgagcgctggccgcttattctcgagcagactacgccttagccgctcgctaaaaccaccatgtccgatttaatcacaacacgcccgaccctgggtatgctatatctgaagtgtctcattttcgggagaaaacgatgaaacgacctgattgcattcgccactggcgcgaactggaagggcccgacgatgctacttatcccgacagcccggagcgtttttcaatcggcgcgccgctggggcgaggtttacgtctcaaccggctggggatccaccacgagcggctgccgcccgggcggcgcacctcttatccacacgcggagagcgatgaggaagagttcatctacgtgctggagggctatccggaagtgtggataaacggctatctctggaagctggagcccggcgacagcgtgggttttcccgctggtaccggcatctgccacacctttctcaataacaccgagcaggaaattcgtctgctggtggtgggcgaggccaacaagaagtacaaccgcatttattacccgctcaatcccggctatgccgcgacgcgccaggatcgttgggttgaccatccgccgcagttcttcggtccacacgacggtaagccgcggaaaaagtaatcatttcaggtgaggggcgaagcgcggcgcactatgcgcctgtggtgtatctttatgctatagtagcgcccctttttacccggatgcttatttattcgccatgatgcctgaatcaacgtcacctgttttccctgctcaccgcttctccatcgcgccgatgctcgactggaccgaccgacactgccgctacttcctgcggctgctgtcgcggcatacgctgctgtataccgaaatggtgaccaccggggcgattattcacggcaaaggggactatctggcctatagcgaagaagagcacccggttgctctgcagctcggcggcagcgatccccaggccctggcgcagtgcgcaaagctggccgaggcgcgcggctatgatgagatcaacctcaacgtcggctgcccctccgaccgcgtgcagaacgggatgtttggcgcttgcctgatgggcaatgcgccactggtggccgactgcatcaaggcgatgcgcgatgtggtgtcgattccggtcacggtgaaaacccgtatcggcattgacgaccaggacagctatgagtttctgtgcgatttcattgagacggtctccggcaagggcgagtgtgagatgtttattattcacgcccgcaaagcctggctctccgggctgagcccgaaagagaaccgcgagatcccgccgctggattacccccgcgtctggcagctgaagcgcgatttcccccaccttacgatggcgatcaacggcggcatcaaatcgctggacgaagccagagtacagcttgagcatatggatggggtgatggtcgggcgtgaggcctatcagaacccgggcattctggcctcggtcgaccgcgaaattttcggcgtcgccggcgcggatgccgatccggtagcggtggtgcgagccatgtacccctatattgagcgcgagctcagcaagggcacctatctgggccatattacccgccatatgctggggctgtttcaggggatccctggcgctcgccagtggcgtcgctacctgagcgaaaatgcgcataaagccggcgccgatattgcggtgctggagcatgcgctgaagctggtggccgataaacgttaatttctgaccaaaacctggtgaaattgaccacgcctcgcgcactgacgcggggcgttttgttttaaagtcaagtgcttatgtttggcatgctttttgtaatacctgcagagtgaagtattcattttttggggagagaaccatgctggaactgctatttgtcattggattttttgtcatgctgctggtcaccggcgtatcgctgctggggattatcgcggcaatcgtggtggcgacggcgctgatgttcgtcggcgggttgttcgccttgatgatcaaattactgccgtggctgctgctggcggtggcggcggtgtggattattcgggcgctgaaatccccgaacggaaatgcttttcgcgacaataaccgttggcgttactaaggtattgaggggtgcgtcacaacctgaacaattatgcagacaaccgcgtaggcattgctgcgcaaatctgtcactattagcgcgttaacgaattcatcgcgctgtaccctacatacagccgaactaaaaaaaagtaagggcttcccaggtggaagccctaaacttttgccccttctgccaacttatggcagcagcaaactcgaaccctgcgtcacccggctctccagaacttcatgcgcccgccgcgcttcgctcagcggatagatctgactttcagccacgtccactttaatcaccccgctggcgatcagcgaaaacagttcactgcaggcttcctccagttcttcccggttggtgatatagccctgcagcgatgggcgagtgacgtacagggagcctttttgattcaggatccccagattaacgccggtcaccggaccggaggagttaccaaagctgaccatcaggccgcggcgctgcagacagtccagagaggcctcccaggtatctttccccaccgagtcgtagacgacggccactttcttaccgtcggtgagcgccttgagccgctccacgatagactcctcgcgatagttaatcacctgccaggcgcccgcctctttggcgcgctgcgctttctgcgcgctgccgacggtaccgataagtttcgcccccagcgctttcgcccactgacaggctatcagccccacgccgccagcggccgcgtgaaacaggaacatctcatcaggcttaatttcataggttttgcgcagcagataccagaccgttaatcctttgaggaacgacgcggcggcctgttcgaaagagatagcgtccggcaggaccgccgctttgtcggccagcacattgtgtaccgtgctgtaggcgccgagcgccgactgggcgtacaccacccgatcgcctaccttaatatgcgtgaccccatggccaactttactgacgatgccggccgcctcggtgcccaggccgctcggcagcgacggcggcggatagaggccgctgcgaacataggtgtcgatatagttgatgccgatggctttgttttcgacctgaatctcatgttctgcgggatcgcgtggcgtgaactcaaccgcctgaagcacctccggtcccccgtgtttcgaaaattcgatgcgtgttgccatgttcgctcctgtgttgttccgagattattcagtaagcttaacagcctgcgccggcggcgacggattttcttacccgcctcaggcctgccacgcttaatgggttctttagcggcaatggctttctcgctatactgtcacgctcttttccggatcggtgaaatgttaggctatggcaggaaataaacccttcaacaaaccacagacagaaacccgcgaacgcgatccgcagctcgccgggctgaaagtcccgccgcactcgattgaagcggagcagtcggtgttgggcggtttaatgctggataacgagcgctgggacgacgtcgccgaacgcgtcgttgccgacgacttttatacccgtccgcaccgtcatatttttaccgagatggcgcgcctgcaggagtccggcagcccgattgacctgattacgctcgccgagtcgctggagcgtcaggggcagctggacagcgtgggcggcttcgcctatctggccgaactgtccaaaaacacgcccagcgcggctaacatcagcgcctatgccgacatcgtgcgcgaacgcgcggtggtgcgcgaaatgatttcggtggccaacgagatcgccgaagccggcttcgacccgcaggggcgaaccagcgaagatctgctcgacctcgccgaatcccgggttttcaaaatcgccgaaagccgggccaacaaagacgaagggccgaagaacatcgccgatgtccttgatgccactgtcgcccgtatcgaacagctgttccagcagccccatgacggcgtcaccggggtcaataccggctacgacgacctcaacaaaaagaccgccggcctgcagccgtcggatctgattatcgtcgccgcccgtccatcgatgggtaaaacgaccttcgcgatgaacctcgtggaaaacgcggcgatgctgcaggacaaaccggtattaatcttcagtctcgagatgccctcggaacagatcatgatgcgttctctggcctcgctgtcgcgcgtcgatcagacccgcattcgtaccggtcaactggacgacgaagactgggcgcggatctccggcaccatgggcatcctgctggaaaagcgcaatatctatatcgatgactcctccggcctgacgccgacggaggtgcgctcccgcgcgcggcgtatcgcccgcgagcacggcggcatcggactgattatgatcgactacctgcagctgatgcgcgtgccgtcgctctccgacaaccgtacccttgagattgccgaaatctcccgctcgctgaaggcgctggcgaaagagctgcaggtgccggtggtggcgctgtcgcagcttaaccgctcgctggagcagcgcgccgataagcgcccggtcaactccgacctgcgtgagtccggctctatcgaacaggatgccgacttaatcatgttcatttaccgtgatgaggtctatcacgagaacagcgatcttaaaggcatcgcggaaattatcattggtaaacaacgtaacggtccgatcggcaccgtgcgactgacctttaacggccagtggtcgcgtttcgataattatgccggtcctcagtatgatgatgagtaatccttccgccttcttttattaaggaattcaaatgcaagcggcaactgtagttatcaaccgccgcgctctgcgacacaacctgcaacgtctgcgtgaactggcgcccgccagcaaactggttgcggtagtgaaagcgaacgcctacggacacggtcttctcgagaccgcgcgaacgctgaccgacgccgacgcctttggcgtagcccgcctggaagaggcgctgcgcctgcgagcggggggcatcgcccagccgatcctcctgctggaaggcttttttgctgcggaagacctggcggtgatcgccgcccagcgcctgcatacggcggtgcatagccccgaacagctggcggcgctggagcaagccgatctccccgagccggtgaccgtgtggatgaagctggataccggcatgcatcgcttaggggtgcgcccggaggaagccgaggcgttttatcagcgtctgagccagtgtaaaaacgtccgccagccggtgaacgtggtgagccacttcgcgcgcgccgatgagccgacctgcggcgccaccgaacgccagctggatatcttcaccacctttaccgaaggcaaaccggggctgcgctctatcgccgcctcgggcggcattctgctgtggccgcaatcgcattacgactgggtgcgccccggaattatcctgtatggcgtgtcgccgctggacgatcgctccaccgggaaagatttcggctgccagccggtgatgaccctgacgtccagcctgattgcggtgcgcgagcataaagcaggggagcccgtcgggtacggcggcacctggatcagcgaacgcgatacccgtctcggcgtggtggcgatgggctatggcgacggttatccgcgcgcggcgccgtcgggcacgccggtgctggtcaatggccgggaagtgccgattgtcggccgggtggcgatggatatgatctgcgttgatctcggaccgcaggcccaggataaggccggcgacgcggtagtgctgtggggagaggggctcccggtagagcgcatcgccgagataacgaaagtgagtgcttacgaacttattacgcgactgacctcccgcgtcgccatgaaatacctcgactaagcctctggcgtaccggatagcacagaggctgatccggtacgcaccaggcctgcggcgctcaaaaaagcggtttataccgctgcgcggtcactttcccctcaacatcctctcgacctgccgtcatatccggtttattgtgtaagaacctgccccatgtaaacctggagatacatcgcgtgtttcaaaaagttgacgcctacgccggcgaccctattctttctctgatggaacgcttcaaagaagacccgcgaagcgacaaagtcaacctgagtatcgggctgtactacaacgatgacggcattatcccgcagctgcaggcggtggcggaagcggaagcacgcctgaacgccgagccgcatggcgcctcgctgtatctgccaatggaagggttgagcggctaccgtcaggcgattgcgccgctgctgtttggcgcagagcataccgcgcttaagcaaaatcgcattgcctctattcagacggtcggcggttcgggcgcgctgaaggtcggggccgacttcctcaaacgttactttcctgagtctcatgtctgggtcagcgatccgacctgggaaaaccacatcgccatttttgaaggggctggcttcgaagtaagtacttacccctggtttgataaagccaccaacggcgtgcgctttgaggacctgctggcgacgctgcaaacgctgccggcccgcgatattgtgctgctgcacccttgctgccacaacccgaccggcgccgacctgacgccagcccagtgggaccgcgtggttgaggtattgaaagcgcgtcagctgatccccttcctcgacatcgcctaccagggctttggcggggggctggaagaggatgcctacgccattcgcgccatcgccagcgccgggatgccgatgctggtcagcaactcgttctccaaaattttctcgctgtacggggagcgcgtcggcggtctgtccgtggtctgtgaagacagcgaaaccgcgggccgcgtgctggggcagctgaaggccaccgtgcgccgcaactactccagcccgccgagctttggcgcgcaggtggtggcgacggtgctgaacgatgcagctctgaaagccacgtggcaggcggaagtggacgccatgcgcgcgcacatcctgaccatgcgccaggcgctggtcgacgcgctgcagcaggttgcccctggcagcaaagtggattacctgctcaagcagcgtgggatgttcagctataccggatttagcgcggcgcaggtggatcgtctgcgcgacgagtttggcgtctacctgattgccagcggacgcatgtgcgtggcggggttaaactcacgtaatgttcagcaggtagcgaaagcttttgccgcggtaatgtaagccgctctccagcaggttgtctctgccggtcaacgggcaggggcaacccccctcggatgtgatcatcctctttttctatgacatctgcgcgaaaaaggcttttcatccatgccgccggcgggtaaggtcgggacgttgataagcatgcacattattgaaaacaataatgattgatagatttagggataaatatgcgcaaacttactctcgcccttgcggcggcttctctcctgttcacgctgaacagcgccgttgtggcgcgcgcctccacgccgcagccgctgtgggtcggcaccaacgtggcccagctggccgagcaggcgccgatccactgggtttcggtggcgcaaattgagaacagcctgctggggcggccgccgatggccgtcggctttgatatcgatgacaccgtcctcttctcaagtccgggtttctggcgcgggcaaaaaaccttctctcccggcagcgaggattacctgaaaaacccgcagttctgggaaaaaatgaacaatggctgggatgaattcagcatgccgaaagaggtggcgcgccagctgattgcgatgcatgtgaagcgcggggacagcatctggttcgtcaccggccgcagccagaccaaaaccgaaaccgtttctaaaaccctgcaggatgattttctcatcccggctgccaatatgaatccggtgattttcgctggcgataagcctggccagaacaccaagacccagtggctgcaggcgaagcagataaaggttttctacggcgattcggataacgatatcaccgccgcccgcgaagcgggcgcccgtggcatccgcgtgctgcgggccgccaactcctcctataagccgttgccgatggctggcgcgctgggcgaggaagtaatcgtcaattccgaatactgatgaccgcctgaacgcgataaacggcagcgacggcgctgccgtttttttatgcaaaatcaggggtggaaggttttaccttttcacgtattgctgcacacttagaaggattcattcgcaaaaggagtcaatgatgtggtatcagcaaaccctgacgcttgggccaaaatcccgcggttttcatctggtcaccgacgaaatccttggccagatccgcgggctgtccggggtgaaggttggcctgctgcacctcctgctccagcatacttccgcttccctgacgctcaacgaaaactgcgatcccaccgtccgctatgacatggagcagtattttctcaacgccgtaccggacaatgcgccgtatgaacatgactatgaaggccctgacgatatgccgtcgcacatcaaatcatcgatgcttggcgtgtcgctaatgctgccggtcgaggacgggcgcgtcaggctgggaacctggcagggcatctggctgggggagcatcggatacacggcggttcgcggcgcatcgttgcgacgctcatgggggaataaaagatgacaatttcggagttattacagtactgcatggcgaaaccgggagcagagcagagcgtccacagcgactggaaagccacgcagataaaggtctcagacgtgctttttgccatggtgaaggaggttgaggaccagcggccggcggtcgcgctgaaggcgagtccggagctggctgagctgctgcgtcagcagcatcgcgatgtccggcccagccagcatctcaataaagcgcactggagcaccgtctatctggatggctcgctgccggattcgcaaatctactatctggtcgatgcgtcttatcagcaggcggtgaaaatgctgccggagccggtccggcagcagcttacccgctaattatttcagcatgggcttgaggaagcgcgcggtgtgcgaggcttcgcactcggcgacggtttccggcgtaccggagaccaggatttcgccgccgccgctgccgccttccgggccgagatcgacaatccagtcggcagttttaatcacatcgaggttgtgctcaatcaccacgatggtattgccctgatcgcgcagctggtgcagcacttccagcaactgctggatatcggcgaagtgcagaccggtggtcggctcatcgaggatatacagcgtctggccggtaccgcgcttggacagctcgcgcgccagcttcacgcgctgcgcctcgccgccggacagggtcgtcgccgactggccaaggcggatataggtcaggccgacgtccatcagggtttgcagcttacgcgccagcgccggtacggcatcaaagaattcacgcgcctcttcaatggtcatatccagcacttcgtggatggtcttacccttgtacttaatctccagcgtttcgcggttatagcgtttgcctttgcactggtcgcacggcacgtagatatccggcaggaagtgcatctcaaccttaatgacgccgtcaccctggcaggcttcgcagcgcccaccgcgaacgttaaagctaaagcgccccggcgtatagccgcgtgagcgagactccggtacgccggcgaacagctcacgcaccggggtaaacaccccggtataggttgccgggttggagcgcggcgtccggccgatcgggctctggtcgatatcgatcactttatcgaaatgttccagcccctggatatcgcgatacggcgctggttcggcgatggtcgcgccgttgagctggcgctgggcaatcgggaacagggtatcgttgatcagcgtggatttacccgagccggagacgccggtgatgcaggtaaacaggcccactggcagggtcagcgttacatccttcaggttgttgccgcgcgcgccggtcagcttgaggactttctccgggttggcgggcacgcgctgtttcggcacttcaattttgcgtttaccgctcatgaactggccggtcagggattccgggaccgccataatggcctccagcggcccttccgctactacctggccgccgtgaacgccagcgccgggaccgatatcgatcacatggtcggcggcgcgaatggcgtcttcgtcgtgctcaacgacgatcaccgtgttgcctaaattacgcaggtggatcagggtgccgagcaggcgttcgttatcgcgctggtgcaggccgatagagggttcatccagcacgtacatcacgccaaccagcccggcgccaatctggcttgccagacggatacgctgggcttcgccgccggagagcgtttccgccgagcgggagagcgtcaggtagttgaggccgacgttgacgaggaatttcagacgatcgccaatctctttcagcactttttcggcgattttcgcccgctgtccggagagcttcagattgttgaagaaatccatcgcatggccgatgctcatatcggagatggtcggcagcggggtgttttccacaaacacgtggcgcgcctcgcgacgcagacgcgtgccgtcgcagctggcgcacggacggttgctgatgaacttcgccagctcttcgcgcaccgcgctggattccgtctctttgtaacggcgctccatgttatgcagcacgccttcgaacggatggcggcgcaccgaggtatcgccgcggtcgttcatgtatttgaattcaatactttctttacctgaaccgtacagcaccactttctgcacgttggcgctgagggtgccccatggcgcttcgacgtcgaatttatagtgctccgccagcgacttcagcatctggaagtagtagaagttacgccgatcccagccgcggatggcgccgcccgccagcgacagctcgggattttgcaccacgcgatcgggatcgaaatattgctgcacgccgaggccgtcgcaggtcgggcaggcgcccgccgggttgttaaaggagaacagacgcggctccagctcgcgcatgctgtagccgcagatcgggcaggcgaagttggcggaaaacagcagttcttccgctttctcatcatccatattagccacaatggcggtcccgccggagagctccagcgcggtttcgaacgactcggccaggcgctgcgccagatcgtcgcgcaccttgaagcggtcgatgactacctcaatggtgtgcttcttctgcagctccagcttcggcggatccgacagatcgcagacctcgccgtcgatccgcgcgcggatgtagccctgactggcgaggttttccagggttttagtgtgctcgcctttgcgctctttaataatgggcgccagaagcatcaggcgcaggccttccggctgggcgaggacattatcgaccatctgactgacggtttgcgccgccagcggcacatcgtgatccggacagcgcggttcgccgacgcgggcgtacagcagacgcagatagtcgtgaatttcggtaatagtacccaccgtcgagcgggggttgtgagaggttgatttctgttcgatggaaatcgccggcgacagcccttcgatatggtcgacgtccggcttctccatcagcgacaggaactgtcgcgcataggcggagagcgattcgacgtagcgacgctggccttcggcatacagggtgtcgaaagcgagtgaagatttgccagacccggaaagcccggtgacgacaatgagtttgtcgcgcgggataacgaggttgatgtttttgagattatgggtgcgggcgccccgaacttcgatcttatccattcacctttcccggtaggtagatacacggattgcctggtttgcttgaaggacaaacggcagaaacggctaattatgacacaatttaacctgaatgaatatacagtatcggaatgcaaattcgggtcgagtgtgcaacaatgccgtagccgggtactatctctggaatcagcctcgcagctattaaaatgctacgtggaaatggtacactcgcgcgtttacactattaagaaacgtattcaggagacacgaacatggccagcagaggcgtaaacaaggtgattctcgtcggtaatctggggcaggacccggaagtacgctacatgccaagtggcggcgctgtcgccaacttcacgctggcaacttccgaatcctggcgtgacaagcagaccggcgaaatgaaagagcagaccgagtggcaccgcgttgtgctgttcggcaaactggcggaagtcgctggtgagtatctgcgtaaaggctctcaggtgtacattgaaggccagctgcgtacccgcaagtggaccgatcaatccggtcaggacaaatacaccaccgaagtggtggtgaacgtgggcggcaccatgcagatgctgggcggccgtcagggcggcggcgcaccggcaggcggcggccagcagcagggcggttggggtcagccgcagcagccgcagggcggcaaccagttcagcggcggcgcgcagtcccgtccgcagcagcaggccccggcagcgccttccaacgaaccgccgatggacttcgacgacgacatcccgttctaaggcttgccttaggcgcactgtctgcgcagtcgaaaacagaaagccccggtttcgccggggctttttctttgttattcctgcaccgtcatttcaggatggaatttgacctacggtaacgagcgattcagatgacgggcacctgagcggtggcggctgtcgccacgctgggctgcggtttggctggctgcgccaccggctcctgccgcggtacggccgtcgctttctgtttgcgggccatgtcatcgacgatcagccgataggcgatgtaatacttatagatattgctgacgtaggttaccgtctcggcgccaattttttctgccgccatattttcgacgttaccgaaccagacgttcgggtcaaatcctcgctgtttagtcatggtgcgcaggcgggcgatacgcgccggacccgcgttataggaggcaaaggtaaacagcgctttatcgagccgggtcatgggctcatcggcatagtaccgatccatcatccagcgcatgtatttcacgccggcatggatattgggatccagctgtttaatatcgcccaccttcagctcttttccagtgctgggcatcacctgcataacgccgatggcgccgacgtggctccgtaccgactgattcagccgcgactcctggtatccctgggccgccatcagcagccagtcgacgtcgtaacgatcgccgtacttgcggaagacatctaccatcgcgaggaatttgcgtcgttccttactcgccgcggcatttttgacatatttagcatttttcaggtaacgcagcaggagagtattgcccagcgtggtgccctgacgattctttttgacgaagttgttcagtaccgtcagcagctgcgagctgtctttgcgtaccgcccaggcaatgtcgccgccgtcgcgcagcaccacattgtcatggacctgaatttttggaaacacctgtttccagaacaacgctttatgctgatcgacgacgatcagcggaatcagcccggcgttgagcatttccagcagatcttcatcctccagcgcttccggcgccgcctccagtatcaccggtgggcgcgactcaccggcaaatcgggcgttcagcgcttgcaggctgtcgtaatagctggaggagcggcgaacaaagacggtttgaccagagagttgctccaggctgtcgaccttcggtgaagccgggccggagatcagtaattctttcacgttgctgtagagcggctgggcgaaatcgacctgtgcttcccgcgagggcgtgatagtcagattggcagccgcaatatcgcctttaccttcattaagcgcgataaagagattgtcccgactgaccggcacaaaaacgatatgcagcttcaggtggcgctgtttgagctttttatccttcgctagctgtttattcagatcgttttccagcgcgataaaaatgtcgtgcgtcgccccgcgctgggtgcctttatcaataaaaaagaaggtcttgctgtaggtggttaatacccgaatggtacgacggtcgatcatgccaggcaaatcgcctctccatggccgtagcatatcgtcaatatgaatcgacagcgtgttgtcttcggctgctgccggcggcgctttttccgcctctactgccggcagcagaggagcgaataacagtgtcgcgaggcaggtgagccaggcgataaacagacgtgatagcgagtaggcgttcatggaggaatactccgcaggggatgtgattattttagcagaacggccgccgttaaccgggcacgacaagggcgtaaaaaacataacaatgccgacaaatagttttctcccattttatcgcttactattaatatgtttttatctttaatttaactatggagataatatggcgaaaatgtgtgtttttaatgataaatagaaaataatgatgatgtttttattttatttctccccatctgttttgttgtaaccttttgattgttggtgtttattttatttttcttcgagattgattattatcatcttgataatgaatctcatttttattaccgtaacacggcacattactctaataacacgctgtctggattacgctatcaaagaatagcgcgcagcgctttttctctaatgatgaaacagggcacttaattttattatgcctcatgctgttttcttattcccatgactatcgggaaggggctgacctacgccaaaatctggcgaggcgcagaggcgagtattttatcccattgttttttcaattggggaaggcgttatgcccgacagcaacagaaaacagggcatattctatgaaatacacgtctcacttcccgctggggatcgtcattcctctgctcgcctgtagcgtgccgctgcaggcggcagagaacatgaccgaacaatcgacgcctgacgagagcgccgccactgccgaaaatcacgaggagacgatggtcataaccgccgccaggcagaacctgcaggcgccgggcgtgtcgaccatcaccgcagaagagatccgcaaacatccccccgcccgcgatgtgtcggagttaattcgtacgcagcccggggtaaacctgaccggcaactctaccagcgggcagcgcggcaacaaccggcaaattgatatccgtggcatggggcccgagaatacgttggtgctggtcgatggtaaaccggtgaccagccgtaactcggtgcggtatggctggcgcggcgatcgtgactcccgcggcgataccagttgggtgccagcggagatgatcgatcatatcgatgtgatccgcggcccggcggcggcgcgctatggtaatggcgcgatgggtggggtcgtcaacatcgtgaccaaaccgaccacaccagaatggcacgggtcgtggaatacctatatggacgctccgcagcaccgtaaagaaggggcgacgaaacgtactaactttagcctcaatggtccgctgtcggacagtgtcagcttcaatctctggggtaatctgagtaaaacccaggccgatgcgcaggatattaacgccgggcatgaagcggaacgtaccggttcctacgccggttcttatcccgccggacgtgaaggggtggtgaacaaagatattcacagtaagctgcgctgggagtttgccccgatgcaggccctggagtttgaggccggttacagccgccagggtaatctctatgccggcgacacacaaaacaccaataccagtacgctggtgaagagtatgtacgggaaagagaccaaccgtctctaccggcaaacttacggcgtaacatggaccggcggctgggataatggcgtgaccagcaacagctatgcccagtacgaacacacccgtaactcgcgaatggatgaagggctggcgggcggtacggaagggatcttctccagtagcgagttttcagatatcgatctggccgatgtcctgctacatagtgaagtgaatattccgtttacgctgggggtcgatcagaatctgacgctggggacagaatggaatcagcagcggatgaaagatggcgtatcgacaacccaggcgctctcttacggcactatcgatggcgtatcggctaccggtcgtagcccgtactccagcgccgagatcttctcgctgtttaccgaagataatatggcgctaacggacagcaccatgctgacacccgctctgcgcttcgatcaccacagcatcgtcggcaataactggagtccctcactgaacctgtcccaagagctgacggacgactggacgctgaagctgggcattgcccgtgcttacaaggcgcctaacctctaccagttgaacccgaactatattctctacagcaatggtcaaggctgttacgccagtagttccgcctgctatctgatggggaatagcgatctgaaagcggagaccagcgttaataaagagattggtcttgagtacaagcatgatggctatcaggcggggatcacctggttccgtaacgactatcacaataagattgagtcagggtatgcggcggtgggtaccgccagcaacggcaccaccaatatctatcagtgggaaaacgtaccaaaggcgttagtggaaggcctggaaggaacgctgaatctgccggtgggggaggcggttaactggagcaataacctgacctggatgctgcagagcaagaataagacgacaggcgaccggctgtcagtgatcccgcagtttaccctgaactcgaccctaagctggcaggttcgtgaagatctctccctgcagagcacctttacctggtatggccgacagaaaccaaaacgcttcaattataagggcgaggcggtcagcggcagcgaactaaacgaagtcagcccatacagcattgtcggcctcagtgcgacctgggatgtgaacaaaaatctgagcttcaccagcgggatagataacctgtttgatattcgccactaccgggcagggaatgcgcaaacgaccggcaacgcgacgacgggagcttatctgtatggcgcgggtgccgagacctataacgaatcggggcggaccttctttatgagcgttaatactcatttctgatgatcctgatgaggagtaaaccgggtgcaatgcgacccggtttttttatttcagatgagagcggaggaggcggttataaatcgtgacaaaatcttcacgccctctacattattagctcaacatatccttttatactgatttccgtcgcgcaaggtcgttgatcccgaccgggttcgataatagcatcctgctatttcccttctgtaatatcccctgtcccccttccattcccaaccgcagcgatgcggaggagggggacctccttatttttgccgcgtgatctgatagcgatactgagtgggcgtgagcgcatgatattttttgaaggtacgattaaacgcactgagatcgtcataaccgaccatcatacaaatatcgacgattcggtaaccaggcgtcgtcagcaataaacggcgacacagcgacatgcgctgctggcggatatattccattggcgaacgatcaaaataatgacggaagagccgaaacaaatgccagggggaataaccagagatatcgctcagatcgtcgacggtcagtttcttatccagattattatcgatccacaagagcaggtcgcttaataccgattgctggagcgttttgctacgcataattgcggccaatcccataacgcagggctcctcaatgaggagccctggggtttattgaacagtgagtgtgccgtggcgaacctgataatttttttgattatcagggccaatatagtcgctggcgggttttgccagctgcagatgaccaaaggcggttgtttgctctgcatgataattttcgccgtcattcacgtcgccgcgcccgttataacgggcaatggccgggaagggatacaccggacgagtcgcgataacagctggagcggcgtcagcgtaaggctgactgactttctgcacgccgtgaaactgcgtttgcgcatctggtttttctgtcatcggcggcaggtcggcagcggctgttgcccgtttgccggccatgatctcctgcggcgcgatgccttcctcggtccagcgcatcagcggggtaaggagatcaatttgatcgtaaccttcgccattaccgcaatgggctaccccaggcagcaggaataaccgcaggaaggtatccgttgcggcatggcccatctctgcttctacgccgcgataataggcgatagaaaaggccggactgacggagtcatcggccagaccgtgccagaggataagcttgccgccgcgctgttgataggcatgaagattggtatttgccgcgttatagagcggcgccagttgggcgacggcgtcaaaattctgctggttaagcgggaaatcccgcatcgattggatcttctgtttttctcctggcaggagcacggattgcagagccggtagtaccatcatttccgacattgagtggccggtcggcgtctcgggcaccggccagcgtagctcggaacccagcggcagaccgcccgcgacgaactgggcgccgtggctgtcgtaagcgccgcggtagagctttttcaccacctcgatctcttcctgcgtcaggcaggtagaacggtcccgagcatcggcaggacagcgggggagccatgactcagagaactgacaggcatacggattttgcaggataccatcctgcacgccggaaagcgtcgggcagtgagccagcacggcctggtgaatcagaggaaggcgatttttcagcaggatagcggtaccgtccgggcgctgattggcggccacattccagccgtggaagaaggagttctgaaactggaaaaaggccgctggcgcgccagcgctgataccgtcaaaatcctgcggaaagcgctgcgcttccatcaatgcttcgcgaccgccgtctgagcagcccataaagtaggcatactttggcggctggcggtaaagcgtctgcatcaccgctttggccagcacggcggtcaggtggttggcgcgccaggcaaaatcgatgcgcttttgcggatcttcggcccatgacgcatccatcatactgccatggtgccccatatcggttgctgccaccacaaactcgccgttcattgccggcaggcagccgctggcattcgacagactcaggttaatactcccgcacagtccgccacagccgacctgcaaaaaacgttgactccagcgttgagtcggcagggcaatctgcacgccaatctcaggggcgatagtggcgctcaccttgcaccagcttccctgcgcggaggtctgcatttcagtgtgattgatagtgacctttgcgccaacggccgcgctgaagtcggtagcgcttagcgcatcgcatgtcagcgcgggaagaacgatcggcagactggcgacagcctgcgtgggtgaagcgaacgataacccgaagagggcgcagaggatgatgggcaagattgtcttgagtaagcgtgtcatacgcagttccctgtggctgatgatgggaggcggcaggatggcgaaacctatgcctcaccttccctggcgaggcgccactgcttggctattgtagataacgatagactttccttgatgccttgataaggcgaccctactgtattctgctattttgaggaaaatatggagatgtttgccaacggcgtctggcggtgaattcggggtagaatgttgtgatatcagttgcataatttattcaatttctcttcattaaatctgctgggttgcaggttatttttctccctgttcctggtgatcccagagagcatcattcctaacgagatccttccccctttccattaataagaaagggggctttttattaataaaacgttcaggcaaatctaaatatagtactggtgttggccattagaaccatgcgcttcagaaaaagttccatcattaaatatatttttaaagatgctttaacatccattttttctccattttgtcgccataattgcatgtaattctgcgcctcgctcaggttattttctgtcgcatattttagagatgcatcctgaacaaataagctcaacgccagcagaacactgctattgctcattatctcgtagacgacacattcatgttaaaaaagactcatatcatcagcggattattgatcgcccctttaacgttatatgccgcaacatcatatcaagttgatgatatccgttttgaagggctacagcgcgtgaccgtcggggcggcgctattaagtatgccattgcacgcgggagatgcggtgacgccagaagatgtcagcgaggcagtgcgcgcgctgtatgcgagcggcaatttcgaaaatgtgcagatcctgcgcgatgggaaaacgctggtggtgcaggttaaggaacggcccactattgccagcgtcagtttttccgggaataaggcagtgaaggatgatgcgctaaaggaaaatctcaccgcgtccggtatttctgcaggtagtgcactggacagaaattcgcttagcgaaatagaaaaggggttgcaggatttctattacagcgcggggaaatacagtgcgcaggttcacgcggtggtgaccccgttaccgcgtaatcgcgttgacttaacgttcgtttttcaggaaggcatctcggcgaaaatcgcacaaataaacattatcggtaatcaggcgtttcgggaagaggcgctcctggaccagcttcagctacgtgataatgtgccgtggtggaacgtggtagccgataaaaaataccagaagcagaagctggaagccgatctggaaacgctgcgcagtttttatctcgatcgcggctatgcgcgctttgctatcgagtccacgcaggtcagtatgacgccagataaaaaatccctgtatatcactatcgccctcaatgaaggcgaacgttatcgggtcgaccgaactcaggtgacaggcgatctggctcagcatgggccggagatcgaggcgcttgcccagccgctggcgggggcatggtatagcggggcgcaagtcaccacggttgaaaatgagatcaaaaagcactttggtaagtatggttatgcctggccgcaggtgacgtccacgccggaaatcgatgatgcgcatcaccgcgtggtgctgcatattcaggtcaacgcgggccgccgctactcggtacgccagatccgcttttccggtaacgacacctcccgggacgcggtgctgcgtcgtgaaatgcgccaaatggaaggggcgtggctcaacaacgaaaaagtcgatcaagggaaggtacgtcttgatcgaacgggtttttttgagaacgttgaacagcagatcgttccggtcaatggaacggcggatcaggtcgatgtggtctacaaggtgaaggagcgcaacaccggctcattcaatgtgggcctgggatttggtacggacagcggcgtgagctatcagcttggcgtgacgcaggataactggctgggaacgggtaatagcgtgagcttcaacgggacgcgcaacagctaccagtcttatcttgaactgggggcgacgaacccgtggtttaccgtagatggcatcagcctgggcggaaagattttttataacagctatgatgcttctgatgcggatgccgggagctataaccagcagagctatggtttaggtagtacgctagggtttcccattagcgaaaataactccctgaacctgggactggattatgtccataatcgcctgaccaatatggatccggagctgacgacctggcgctacctcagctctcggggaatcgagcccagcgtggtgacgaaagatggcgacagcggcgcaaaatatagcgccaacgattattttgtgagtcttggatggggctacaacgatctcgatcgcggcttcttcccgcgtgcgggaaacaagagcagcctgagcggtaaagtgacgctccccggttcggataatagctactacaaactctcttttgacaccgcccagtatctgccgctgagcgagaacaagcgctgggtctggatggaacgcctgcgcgcaggctatgccggcgggttagacggcaaaagtgtgccgttctacgataacttttacgctggcggttcgtcgtcagtgcgcggattttcttctaacaccattgggcctaaagcggcctattaccgctgtaacggtagcgaaagcagctatagcgcctgcccgctggacgcctcgtctgatgcggtcggcgggaatgccatggcggtgctgaacagcgaatttatcattccaaccccctttgtgaatgataagtacgccgatagtctgcgaacctcgctgtttgttgacgcggggacggtctggagtacatcctggcacaacaccgcgcagacgctggcggcagggatccctgactacggcgatccgagtcatattcgtctctccgcggggattgccgtgcagtggatgtctcccctcggtccactggtcttctcctgggcagagccgtttaaaaagtatgatggcgataaagccgaacagtttcagtttaatattggcaaaacctggtagggctccaacggggcctgatagaccggcgtggctatattctgtggactgtcctccgacatagcgattgagcagaatatactcaaccgctatgtcgatattatcgctaaggaatacgatctggcgggacacccgcgacatttacccgagcgcggtctgagggccttgcggacctggtggcgtacgacgaggtaaccgcgcaataaatagctgcctgctactatcctctcttcttgccaaaccgcgggtaatactcagtgctgcatcatctaataccaatgactgaggcctcatccagagggactaagacgtattgtaaattaagtttatattatcttattttttattatattttcttttttaagggtaatttggctgtttttcatcaggcctaaccataaatttagagagggaaatgaaacgttactaataatggagtatgtcgttaggaattgtcttaaatcacataattgccaggggcgcttgcgatttataacaatgaatgctatcactatatattgtaataatttgtagcatctttataaggaaggaatatgaaatggactattcttaataccctgatctgcccgcaatctggtatcgccttctcggctatatccagtctgcgtttcttgaaatttatcatgtggtacgaggctgatgtaatcctgttgcccggtgagtcgataagactctattcctcgagagttttaattaatgaccagtatcattcattaaaaatctataatattacggtgtacgacgaggcgcagtgggaaaaattacgcgagcgaccatcgtgcccgtaccatgccggtggcgagcggtctgactcctgtttttaccagtccttttgcacgattaagcgttgcccgaataatattccccgcagtgaaccctggcgttagccagtccacgccgccggtcagacaccgacggcgtggcgtcatttcgccagcagggcggccagtcgaggctggacgcttgcgcagccggccagcacgaggttgcctcgccgcaggcccgcattggcgagaaacgcattgcacgttccgcccgcctcctcaatcaatagcatgcctgccagcgcatcccagctgttcatatgcgcttcataataggcgtggagctgaccggcggcgacatgcgccagcatcagggcgcccgcgccaaaacggcgatactccaggccggcgtcgagcagcgtgtcgatggcccgggcgtagtcgctggccggggcccggctggagcgccccatgccgatcaccaccgcatcgggctccggctcgcgtagcgtcaggcgccgaccgttgagatacgcgccttcgccgcgggcggcgaagaaaaattcatcgcgatcgggggcgtaaatgatgccgagcgacagctcgccctggcacactcgcgccagtgagatgcaccagtaatccatgccgaggataaagttggtggtgccatcgacaggatccagcacccagacggtctggtcgtcgccttcaaaaccgctctcctcgccgaggaaaccctcctcgggaaagtgggcctgcagccagcctttaatctcttgttctaccgcgagatccgcctgcgacacaaagtcctggcgcgcttttttatcgacctgtaatcccgcatcgcgcagcgcctgggcgtgggcgcctgcctggcgaatcaaggcgcataatgactctcgttgtgcttccgtcatagtcctgctctcagataacaaagggcgacgtgcgccggtgaattaaggttacctccacccaggtggtgcgtgaaggttgcgaagggtcggcggcgcgctccagaagccgggcgagcgcctggcgggcgatcgccgccacatcctgatgtagcgtggtgagctgatagctatattgcgcggtcgtcggcgtgttatcaaaaccaatcagctgaaaatccgccggagcctctctgccgcgctggcgcattccatcgagaaagccacaggcaagctgggcgttggcgcaaaagatcccctccagcgcctcgtcggcgagcgccgcagcctgtaacccgcccgcgtaaccttcttgctgacaggcgaggttcgccaggtggcgttcgacgtccactccgcgcgtttgcagcgcccggccgaacgcttccccgcgcatgcggccggcccaggtggaaggatggtggttgagccagccaaagcgctgacagccgctgcgcagcagctggtcggcggccagttcggcgccggcggcgttgtcagaacaaacgtaatccacgccggggatcgtcggctgacgattaatgcccacgaccggaatatgctgctggacgcactcgttcaccagcgcctccggcggctggccggaggtgacgataacgccggagacgcgaaactgagcgaaacggcgcaaggtctgcgccagatcctgctcgctgtggatctcgctcaccagcgcctgaaagccctggcgctggatctcgttaagcagcgcatcaagcagggtactgcgaaaaggatcgctgatgcgcgagacgatcacgccgattaagtggctgcgctgacggttcagcccctgggcgaggaagttaacctgataccccagctcttcggcggcgcgcagtacccgcgcccgggcgtcgggagagatgctgccgttgttgctcaacgcccgggacaccactgcccgggagacgcccgctcgccgggcaacatcctgggcggtgacgctgggtttgcgtgggttcataggaggtacgtctcgtcagtgggcgtgggacgcggcagcgttaaggtgagtccatcccgggaaacgaataagcccggccacggctgacaggcctgctttagcgccgacagggaagcatcctcgcagtgatagagccccagcgccgggagctgcagcgttctgaacagcatcaggcaggaggggaaatcgccatgcgaggcgtcatcgtccagggctgctaccgaggcgcactcctgaaacgccagcccggcgccggccatcagggctatcgagtcggcggtcggtcggccatcgccgctgtaaaacagcgtctgcccggcaatggtgatgcggatggcgcgattactcagctcatgctgggtgggggcagtgcggatctgccagtcctgccacgtccaggcttcgcggcattcctgccagtcgatggtgaaaccaaggtccgcctgcggccagttcgccagcgcggccagctgcatgagcaccggctgctgcgccggctggcagtagataatgactggcttctgacgggaataacttttccagtggttcagtagcgccgtcaggccggtgcagtggtccgggtgaacgtgggtgaagtagatcgcgtcgatatcgttgacctcgccgccgcgctgccagagcgcgcggggaacggtggggccgcagtcgattaaccactgtttgttgtccgcatcgatcacccgcagcgcggaggtattttgcgtgcaggaaaaggcgctcccgcagccaagcacatctattttcatttaccctcgccaaaattttttgccgcttaattaaattgtcataaatacccgacaaagtaggctcacatcatgtcgattcaacgttgcattttttttacagccaaatgaacacgtgttcaccttgctaaaaaaaatgccgcagcagcgctttcaggtagcgaatatgagttatttacagatctccggccttaaaattagttatggcgataaggtggttttacataatatcgatctggcggtagagcagggagagatgattgctctactgggcccgtcgggatgcggaaaaaccacgctgctgaacgccctctgcggctttattccggtgcaaagcggcgaggtggctattgccagccgaacgatcactcatcttgcgccggagcagcgcaatatcaccatggtatttcaaagctacgccctgtggccgcacctgacggtagcgcgcaatatcggctatggcctgaagctgcgcaaatggcgcggggcggatatcgcgcggcgggtggcggagctgctgcgaatagtcaatctcgaagggcttggcgaggtgaaagtgaccgaactgtcgggcggccagcggcagcgggtggcgctggcgagagccctggccatagagccccaggtgctggtgttggatgagccgttatctaatctggatgccaaagtgcgcctgaatgtgcgccatgaaattaaatctctgcaaaagagactggggttcacgtcattaattgtcacccacgatcagcaggaagccttagtgatggcggaccgcattgcggtattaaatcaggggcgtattgaacaaaccggcacgccggaagaaatatatcaacgccccgcgacgcccttcgtcgctgattttatgggggccgataataaaataatttccggtgaattatccgctgccgcaatatccggtttatctgccgctcagcagggtgacaacgttatttattttcgcagcgccgatgccgcgctcgctgaattaacgcagcctgcgccgcaggaggggctggctctggaaggcgtggtggagcaaagcgcgtttctgggcaatctgtatcgtcacagcgtgcgctgccatgaccgcctgctgctggcggatgccgcgcagtgctggccgacaaaaagccgcgttcggctccatgtgccaacgccggccctgcatatttttcctttaccactatcacagtgatatcagcgtgttcattctggggacaatccatgttgactaagacgaaagcagcgatcgtaacgaccctcttcctgagccttggcgcacaggccgacaccattctcaacgtcgccaccgcgggcgatcagaatatggtggattatgtaaaaacctggctggggccaaaatttgaagccgctcatcccggcgtcaaggtgcgggtgatcggtaccggccccggcgacgccgggtcgaataaaattagcgagaagctaacggcccagcaggagagcggcgcgcagcagtgggatatcgacgtcgcggtagtgcaccagaaggcgggcggtgagcaggtggcaaagggattgctgcaaaaataccgtcaggatattcagaccggcggcatggttagttcgccgagcgccacccaggcgctgggcgttaacgttgacggatacgtgatgccgatgttcttaagccagaccgctatcgcctggaacagcgatctggtcactaccccgccggcgtcgtatgacgagctggtggcctggacgcagaaacacccgcaggcttttggctataacggcatcaagaacggcatgtccggcgtcagctttgtggtgggctggatctacgcctacgggaccgacgcccagcgtctctccgccgggccttatgataaaagcgtcgaaaaaggctggcagcaggcctatgagaagctaaaggcgttcaataaaaacgtaactttcaccccgggcaacgccgggacgctcgatatgctgagccggggggaaatcgccatgggcccggtgtgggtcgatatgttctatagctggaaagatcagggcaagctgccgccgtcgatcaagcttgctttactggcgccgggcatgccgggccagccgatgtattacgtcatcccggcgaaggcggcgaatccgcagctggcgcgcgactttatcgcgctggccaccagcccggaagtgcaggcgcaggggatcgtcaagcagtttaactggtatccgggcatcgacgccgggcaggtgaagccgaagctggatgcggcgacctggcaaaagctgtttgccgaaatctcgccggaagcgctggcgaagtatggcaaaagcttcccgatcgccccctactttgacgatatcaaagagggttacgaaagccaggtggctaattaaacctttttccagcccgggccgccgtcccgggcgcttgcttgtgctgacgccaggtttattatgtccagttcattaaaatatctgctgctggttgccccagcggcgctgatgatcgcgatcctgtttttgtatccgctggggttttcgctggtctcggcgtttaccgcgccgggacagccgttcaccctcgatcacttccgcaaggtctatgcgctctacgccagcgatgtgctcttttcgctgcttattgtgctgatctcggtggcgctgttagcgctgctcgccattaccctgtcggcagtgattgcgctgtcaccctgccgacccgttgtgcgtctgctgggttttttgtatcgcctgccgctgtttattccttttatcgttgttgcccagatgatgcgcacttttctcgccaaaaatggcctgatgaacaatgcgctggtggcggccgacctggtcacgccgctggagacgctctcctggctgggatggaaagggatagtgatcacctttgtctggaagcaactggcctttgccacgctgctgatctgcggggcgatggcggcgctggagtcgtcgcagatccttgctgcacgtaatcttggcgcctcccggccgcggatcctgttcgatatcatgctgccgcaggtcctgccgactatcggcgtggcgctggtgctgtcgacggtgaccatgatgtcggtgctgtcggtaccgttgatgatcggcgtgggaaccccgacgatgctaaccgtggatatggcgtttcgcgtcaattcctatggtgattacgcggtggcgaatgcgcttggcgtggtgtcgctggcgatctgcggcgcgctgtcgtggttttacctgcgccacagcctgcagcaaaagggcggtgaatcatgaaagcgctggccctcgtatcaaccccggcatggtgggtgaaagggcgccgtaaagtgcgcgccagtccggtgctgcagaccctgctgctgctgtttatgctgctggcgatgtttggtccgctgctgaacctgttgatctggaccgtagcggaaagctggtattttccccattcgctgcccagccggtgggggctgaagtactggtatcaggttttcaatccatacagcgatgtctccagctcgctgttaaccagcgtgctgatcgctctgttatcggtgggggtctgtttgctgatttccgtacccgccggctatgcgctttcccggcggaaaatgccattacggatgctgttcatgctgctatttcttatcccgcaggcctttcctaacctgacggtatacatgaatgttgcccgattgttttatcagtggggattgaacggcagtatcgcaggggtggtgctggtgcatagcgtccacggtctgatgtactcggtgtggatctgtgtggccgcgttttcagccatcgacccgctgctggcgcgggcatcgcgtaacctgggcgccgggccggtgtataccttctggcacatcgtgctgccgcaggcggcgccggggatcgttgccgccagcatctttgtttttctggagtcgctggatgagtttaccggcactttcttcgtcggggcgccggatatcaccacgctgccgctgctgctctataacgccagcatgtcgggtaactatcaggtctcgtcgattaccgcgctgattttgctggccccgtcgctgctctttatggtggtgatccataaatttatgcgtccggagatgatggcgaaattagggaaataagggctgcagaaaacgaaaaagcttcccgtcgggaagctttttaacctcaggtcatcatcattggccattctggcggtgtctgactcatgacttcaatcatcacatctttgatattgccccagattttggccatatcaagcagggtgataccgagcaaaccggtggcgaaccagcaggcggcggccaggccgaggcagctgcagatcaccgccagaccggcgtaatcgcttttgcgaagctgaatattcagtgagctggcgagaaacatcagtaccgcgctcaccaggggccagcgcaataatacgacactggtagtaatggaagccattaacctatcctcaaagaaagtcgggagccatggacgacctggcgcgactgacgatggcatagcgctctggtctcaactggcgtactagagagtgatgaaacgccatttctgtttcatcaacttgtgtgaactatatcacacttggcgctttattcaccagtcaaaaaatgagcttttgctgcgtttaataactatgaagtttgtgtggatattggtgagcaaccccgggaagcatattttcattcactgcctaatgattattattctgcgggttttattacctgttcttgtttattacacggagaaaccgagtcagatgcgcgtctattcttaatcttgccggaatatcttccgaatacctgataaataagtattattcatcaccatcagaggtaaaactgacgctcgtgagggctgtcggatgtcagctgatgtctatcgcaatcgcgattgctaacgtgttcgggctaccttaattaaggcatatcgcatggatgtaagcgtaaatgggtgacagtgcgccgcataaggcgctaagactcatcggaacaggtttggttattttattgccagtggtgctggcattgtggtttgcccagctgcgggctaaagccgaaaccattgatcaattacactcattttcgcagctggcgctgcaaaaaacggaaatggtcatccgggaagcggatcaggctcgggctaaagccagccagtatcgcggtgagttgtgttcagcggatcaccagcgttatttactgcatattgtgcgcggcctgctgtatgtggaagatctgatctacgctaacggccagcgctttatctgttcaacgtccgttcatcagcaaaccggctggcggatgctggcggctaattacaccaaaaagccggatgtcgcgatttactattaccgggacacgccgttttatccgggctttgccatgaattatatgcagaaggggccctatgttgtggtggttaatcccttctcgtacagctcggtgatcgccagcgaccgcgatttagcctatggcgttttcgataccaaaaccaacctctttttctcggtaagtaacaatgtcgagcccgcggaactccatgcgttaattcgcgaaggcgataccttttttaatcagaatggccgggtgtatacgatcgcccgctccgctattcgccccatcgccgtcattatgtccacctcgcgggccagctactatcacaacttttgtgaccaggccagtctgacgctgccgctggggataatttgcagtattttactggtgctggtgtggtcgcgcacccgccgacagtatcactcgccgcgcaatatgctgcagcgggctctgagctgccgccagctgcgcctgcactaccagccgattatcgatattaaaaataaccgctgcgttggggcggaagcgctgctgcgctggcctgggtttgacggtccggtgatgaacccggcggagtttattccgctggcggaaaatgaaggcatgattgcccaggtcacggactacgtggtggatgaactgttttatgaaatgggtgagtttctggccagccatccacagttgtatatagccatcaatctctctgcgtcggatttccattcggcgcggctgatttcacagatcagtgagaaagcgcacagctacgcggtctgtatcggacaaatcaaaatcgaagtgaccgagcgcgggtttatcgacgtaccgaagaccacgccggtgatccaggcgttccgcgaagcaggctatgaaattgccatcgacgatttcggcaccggctactcgaatctgcataatctgcacgcgctgaacgtcgatatcctcaaaatcgataaaaccttcgtcgatacgctcaccaccaacaacaccagccacctgattgctgagcatatcatcgagatggcgcgcgggttgcggttaaagacgattgcagaaggcgtggagacgccggagcaggtaagctggctctacaagcgcggcgtacagtattgccagggctggctgtttgcgaaagcgatgccggcgcgggagtttatgcagtggttagccaatgctcccgcgcccgcgaacgtgcctcagccgccgcgtcacgcggagatctgatggcgatagtcgctgggagtgcggtcaaactcgcggcggaacacccgggagaaggtttgctgcgagacgtagcccagatccatggcgatatcaaagatcggccgctgggtggttcgcaacgcttccgccgccagcagcaggcggcgctggcgaatatagtcccccagcgtctgatgcatcacggtacggaacatccgctgcaggtaccacttcgagtatcctgactttctggcgactatatcaatgttaagtggttgatcgatatgttcatcaatccattcaatcaaagtttgaataatatcctgatgggacataaagcggcctctctcaattctcgattcgtcgttttgtctgcaggcgagtataattcctcaagttaacttgaggtaaagcgctttatggaaaagaaatcaccccgcatcaaaatgctgttgacgcctggagaagtggcaaaacgaaccggcgtggcggtctcggccctccatttttatgagagtaaaggattgatccacagtcagcggaatgccggcaatcagcggcgctaccggcgtgacgttctgcgcgcggtggcgattatcaaaattgcgcaacgtattggcatcccgctggccactatcggcgacgcgtttggcgtgctgccggaagggcacaatctcagcgcaaaagagtggaagatgctgtcatcgcagtggcgtgaggagctggatcggcgcattcataccctgacggcgctacgcgaccagctcgacggctgtatcggctgcggctgtttatcgcgacgcgactgcccgctgcgcaacccgggcgataaactgggggaagagggaaccggcgcccggctgctggaagacgagtgataaaactaaagcgccacaactgggcgctttagttgttttccggtcttggtctttcgcattatctcgctggttcgcgagagggtttcccccgacgtcgacgtccctcagtattgcgcaatctgttgatggaggttccggtttgcgtcgacactttaactatggcatctgccgtcgctttttcctcactattttgctgaaattttcccggcaatgagcgcctgtttctatagttaatttgaacaaactacgggagaggctcatgctgacggtacatcatcttaatcaatcacgatcgcaacgcgtactgtgggcactggaagagctgcagctgccttatcagatagtccgctatcagcgggagaaaacgatgctggcgccggcggcgctgaaaaaaatccatccgttgggcaaatcaccggtactggaagataacggctatgtgctggcggagtccggggcgatcctcgagtatttgcaggaaacctgggacagcggcgggttgttgaagccgcagggaattgacgacaaactgcagtaccgcttctggctgcactatgccgaaggctcgctgatgccgctgctgttaatgaagctggtgttcgccagccttggcaaaccccctgtgccctttggcgttcgctcgctgggttcgctgctgggcaaggggatacagaaaacgtggctcgatccgcagctggccacccatgcgcggttcattgacgaccatcttgccgcgcggccatggttcgctggcgagcggctgagcatggccgatatccagatgagcttcccggtgatggcattgttggcgcgcggcggcatgcatgaccttgtccatatcgaggcctggcgtcagcgagtggaacagcgaccggcctggcaacgcgccatcgagcgcggcggccccttcaccttacccggcgcctgagatatcagcggatccgatgacgtcgataaatgaaagcaactcactaaaaaattgttagcggattgcgcatagacgataacgtttgcgcatcggctggtcattttctgttcgtcataagcgaaatttagcgaaatacgataaacatcggttgaaaagggttatctaaaggccggataatcgtttgcctttctgtttcgctcccccttttttctgctgtccgggggaggcgataaggttgaccaccgtagtgtatgcgcggagttaaacgtttgcttttttgcggcccccctggcgctgcgattcggtacatggagatcgcgtttaactggcagtggacggtccaccacgcatatcaacgaacgataaaaattttcaggggaagttttctatgtctacgccttcagcgcgtaccggcggttcattggacgcctggtttaaaatttcggcgcgcggcagcaccgtgcgtcaggagattgttgcaggtcttactacctttctggcgatggtgtactccgtcatcgtggtgccgggcatgctcggtaaagcgggcttcccgccggccgcggtgtttgtctcgacctgtctggtagcgggcgttggctcgctggcgatgggattatgggcgaatctgccgatggcgatcggttgcgctatctcgttgaccgccttcaccgccttcagcctggtgctggggcagcagatcagtattccggtagccctcggcgcagtattcctgatgggggtcctgtttacggtgatctcggcaaccggcatccgcagctggatcttgcgtaacctgccgcagggcgtggcgcacggtaccgggatcggcattggcctgttcctgctgctgatcgccgccaacggcgttggtctggtgatcaaaaacccgctggacggtttgccggtggcgttgggcaactttgacagtttcccggtggtgatgtcgctgattggcctcgcggtgatcattggtctggaaaaaatgaaggtgccgggcggcattctgctgaccattatcggcgtgtcgattgtcggcctgattttcgatcccaacgtccatttctccggcattttcgctatgccatccctgagcgatggccagggtaattccctgatcggcagcctggatatcgtcggcgcgctcaacccggtcgtgctgccaagcgtgctggcgctggtgatgacggcggtctttgacgccaccggtaccatccgcgcggtggctggccaggcgaacctgctggataaggacggacagatcatcaacggcggtaaagcgctgaccaccgactccctgagcagcgtcttctccggtttagtcggggcggcgccggcggcggtttatatcgaatcggcggcgggtaccgcggccggtggtaaaaccggtctgaccgcggtgacggtcggtgtcctgttcctgctgatcctgttcctctccccgctctcttatctggtgccggcctacgcgaccgcgccggcgctgatgtacgttggcctgctgatgctgagcaacgtggcgaaaatcgatttcaatgactttgttgacgcgatggctggcctgatcaccgcggtgtttatcgtgctgacctgtaacatcgtgacgggcatcatgatcggtttcgcgaccctggttattggccgtctggtctccggcgagtggcgcaaactgaacctcggcacggtgattatcgctgtggcgctggtggtgttctacgccggcggctgggcgatttaaacccttcgtgctcctcacgggcggctcaggccgcccgttttatttttaagccacatcctgtttccatttgcgttaatctgggtagcgtatgattcacaggcacgacgccttacaggtataaaagaaaacgcagcaaacagggaacacatggaaatattctttaccatcctcatcatgacccttgtggtctcactctccggggtagtgacgcgcgtactgccctttcaggttccacttccactgatgcaaatcgccattggcgcgcttctggcgtggccgacctttggtttgcacgttgaatttgatccagagctgtttctggtactgtttatcccgccgctgctattcgccgacggctggaaaacgccaacccgcgaatttattgaacacgggcgcgagatcctcggcctggcgctagcgctggtggtcgtgacggtggtcggcatcggctttctgatctactggattgtaccgggcattccgctgatcccggcgttcgcgctggcggccgtgctgtcgccgaccgacgccgtggcgctttcgggcatcgttggggaagggcggataccgaagaaaatcatgggcattctgcagggggaggcgctaatgaacgacgcctccggcctggtctcgctcaagtttgccgtcgcggtggcgatgggcaccatggtctttaccgttggcggcgccaccgtagaatttctgaaggtggcgattggcggcgtgctggccgggtttgtggtgagctggtcgtatggccgctcgatgcgcttcctcagccgctggggcggggatgaacccgccacgcagattgtcctgctgttcctgctgccgtttgcctcctatctgattgccgaacatatcggtgtctccggcatcctggcggcggtggcggcggggatgaccatcacccgttccggcgtgatgcgcaccgcgcccttggccatgcgcctgcgcgccaacagcacctgggcaatgttggagtttgtcttcaacggcatggtcttcctgttgttgggcctgcagctgccggatatcctctccagttcgctggtggcggcggaggccgaccccaacgttgagacctggatgctgtttaccgacattatcctgatctatgccgcgctgatgctggtgcgttttggctggctgtggtcgatgcgtaagctcagtcagcgcttcctgaagaagaagccgatggagtttggctcctggactacgcgcgagctgctgatctcctccgttgccggggtgcgcggggcgattaccctcgccggtgtgctctccattcctctgctgctgcctgacgggaatgtctttccggcgcgctatgagctgattttcctcgccgccggggtgatcctgttctcgctgttcgtcggggtgattgcgctgccgatcctgctacgtcacattgaatcgagcgataatgtgcagcagcggaaagaggagcgtctggcgcgcgcggcaacggctgacgtggcgattgtggcgatccagaagatggaagagcgtctggcggcggataccaaagagaatatcgatacccagctgctgaccgaagtcagttcgcgggtgatcggtaacctgcgccggcgcgccgatgggcgtaacgacgtggaaacctctatgctcgaagagagtctggaacgccgcttccgcctggcggcgctgcgctctgagcgcggcgagctgtatcatctgcgcgccacccggcagatcagtaacgagacgctgcagaagctgctccacgatctcgacctgctggaagcgctgttaatcgaagatcaataacctgtaatccggatagcgcgacgcttaactggcgagactgcagtaaatgtgtagccccggtaagcgttagcgcgaccgggggaaacccgggcagcggcgcaagcgcctgacccgggctaccccttcccttgcggaacgcgttgtcaccagagaattattccagccagaacgctttgctgcacgtcagccaggcttcagcgctgcgcgacatatatacgccttcccgccaaatcatccccagctcccagcgcagctcgctttgcaacgggatccagcaaaaattctgccggtcgagacgctggcaaatcggttccggcaggatcgctacgccaatgcccgcctgcaccatggcggcgagaaaatcccactggccgctgcgcactgcgatacgtggcttcacgtcatgctcggcaaacagccgcatcagctgctggctaagggcaaattcctcgttgtagataaccagcggatgcgacgccagctcggccggcgagagcgaggttttaccttcccactccgcggttcttggcgtcaggacgcacagcgggtgattgaacaacggcagaatggtgaggctgctatcctcctcgacaggcagggcggtcatcgccatatcaagttcgccattgctgaccgcctgctggaccgtcaggccgccaaactcggcgatcttcagctcgacgcccggatagcgctggcggaagcgactgatcggctcggccatcagcatcccgaccatcggcggaatgccaagccgcagcacccctttatgcaggtggttgatatcgctcagctctgactccagctggctgaactcgcccaagatcgcctggccgcgttcaaaaacgacgcgcccggtatcggtgagcagtagtttgcggccgtcgcggatcaacagcgtgcagttcagctcatcttcgagattcttgagcatcttgctgatggtgggctgtgtgacaaacagcttttccgccgcgcgagtaaaactctgctgacgaaccacttcaacgaaatagcgcagcgttcggatatccataattattccctgagactatacctgcgatgattttaattcatttctgtccgcttcggcggctctctatactgctcgcctgacttctttttttcaggactatcgcacatggccttcgtgccagctcgcgttgcccccgccgtggcgcaacgacttcagatcccggtacaggtacttctctacgtcgggttattcatcttcgcacaatatctggtgaacaggtggcaggtaccgctgccggctaacctggtcggcatggtgatgctcctgctgctgatcgtctgccgggtgataccggtaagctgggtgcgcgccggcgcccgctggctgctggcggagatgctgctgtttttcgtcccggcggtggtcgcggtggtgaactacgcccagctgttgatggtcgatggttggcggatatttctggtgattgccttaagcacgctgatggtgctcggcgccaccgcctgggtcgttgacaaggtctatcgttacgaagtgggcaggttaaaaaaatgagcgatgccgtgctgagtatcctgtgcctggtggcgacgctggtcctctattacgccaacaaaaaactgtatcgacgttttcataaactccctctgatgccgctggtgttcacgccgatcctgctggtgctgattctggtggtaggccatatctcttatcagagctatatgggagagacccactggctgctgtggctgctgggcccggcgaccatcgcctttgccgttccggtgtatgaaaatgtcgcggtgattaaacgccactggatgtcgctcagcgccggggtggtgacggcggtagtggtggctgtcaccagttccgtatggctggcgcgcgggtttatgttgtctgatgaaattcagcgtagcctggcggtgcgctcggtgaccacgccctttgcgctggcggcggcgaaaccgctcggcggtcaacccgatctggtggcgctgtttgtggtgatcaccggcgtgtttggcatggcggtgggagatatgctgtttttacgtcttgctatccgggaagggatggcgaaaggagccgggttcggcgcggcttcccatggtgcgggaacggcgcgctcgtatgagctgggccagcaggagggcgtggtggccagcctggtgatgatgctgtcaggcgtagtggtggtgctggctgcgccggtcgtgcgctggctgctgttttaacattatcgccagagtgaatgttaataaatattgaggagaggaatagctatcggctattccctgtttttgttattgatgcatttaacggttcatcataaaagattaagccaattcttatatcagcactgactttgtaactaaatgtttctctgcatgcccgtatttaattatggggcaaatattatataaatatccaattatctttgcgaattttataacttcataactctttgatttttatggttttgaatatggccacgcatgcgttgcgatgttatgtcgcaaaaaatcaatttttacattaataattgagttcttacctcatgctagttattatttttacgcgagcttgtattattgaatggattcaaatgctggtcgtttatttatgaataatattaattgtcataaaccatatgtcatgtaaatacatgcatgacgccgcgctgcttgaatttcattctctaatatcgctgcataaagcaattgacggactgattgtcgtttataatggatatgggaataaatatgaagatgagtaaaaaatttctggcgggtgccctgattttctctgcctgcagcgcgctgtctaccgttgcgcaggctgataacaccattacctttaatggtattgtttccgataccacctgtacggcgaccattgatggcggtgtaacggctattgatatgggcaccacctcagtggcggatctgaaagcgtataccttcggcgctgccaagaacttctcctttagcttagctgattgcccgaccgcggaagaaggtggcaacagtatcgcccgcgtcacttttggcggtgtttccgataccgcgaacagcgattattttaaaaaccaggcaactgatgagccggcaaccggcgtcgcagtggcccttttcgacgaagcgggcaatgtgatgaagaataacgaagagggttctgatgttgatatctcttcgggtgcagcaaccattccgttcaccgttaaaatggtgaaatcgggtgatgccgatccgacgaaaggtaccgttcagacaaccgtgacttataacgtgacctatcattaattcggcttcttgttgaatggagaaaggggaatcgcctgctattccccttaaattaaacatatgagatatcctttttttgcgatcggtttattgctgtcttcttccttcgcgcaggccagcgtggtcgttggcggtacgcgtctggtttttgatggtacgaaaaataacgctgtaataacggttgagaataaagatcagaacagcaatatcgttcagtcctggctctcggtgatcgatgccgcctcacctgccaaagacgcatttattattacgccgccactgtttcgtctcaaagccggggagaaaggatttgtccgcgtagttcgatcaggaaagaaattacccgacgatcgcgagtcgatgttttggctcaatattaaagggatcccggcaacagagtatgtacctgataaaaatgtcgtacagtttgcgattaattcgaaaataaaattgatttatcgacccgctgcgttaaaaggtaatacaccggaatcgtacgctgaaaaattacagtgggggaaagaggggacgtcggtgacggtaaaaaataactcaccgctgtatatgaatttctcacaggttagccttaacggtaaaaatatttctggcgcatggtttgctgccccgttttccaccttaaaaatacccgtgcagagtagcctgtcggcgacaggaaaaaaagagatcacatggagcgtgattaatgattatggtatgtcagggaagaaatataccgctatcattcagtagcgttgagctgctattttcaactaaaagtatctgcgtcgctattattctgtgcctaagtactctgccctctcgcgcggaggccggcgaatatttcaacccaaatttactcgaagtcgccgagagtcctgcggcttcggttgatctatcctatttttcgcaagatggcataccgccgggcacctatcacctggatgtttacatcaatgataagtacgtcagttcagactcgctgacttttcaggaaattagccatgacgcaggcgcgactgcttctccctgcctgtccgcggagtatctgaattcatggttgattaataccaccgcctatccgcagttgttcgaggcaggggaaacctgcgcccggctgtcggcgatccccgggatgacgttctcggtatctcttgcccagcagcggattgattttaccgtgccgcaggccgccatgctgaatcgccccagagactatattcccgagagccagtggcaacaggggatcaatgccggtcttctcaactatagcgtcaccgggcagcgtaatgcgccgcggcataacggcgccactatcgacagtcagttcgtcagcctgcagcctgggctgaatctgggaccatggcgcctgcgcaactacagcacctatagccacagcgataacaacagccgctgggagtcggtttactcctatcttgcccgcgatattcacaccctacgcagccagctggtggtcggtaatacgtatacctcttccggcattttcgacagtttgagttttaccggtctgcagctcagttcggacaaagagatgctgccggatagcctgcatggctttgcgccgacgattcgagggatcgcgcgcaccaccgcggaggtctcggtttatcagaatggttacagcatttataaaaccaccgtcgctcccggcgcctttgaaattaacgatctgtacgccaccggcagcgccggcgacctgtacgtcaacattaaagagtctgacggcagcgagcaaaactttgtggtgcctttcgcgtcgctggcgatcctgcaacgtgagggccagctggactatgcgctgagcagcggcaggacgcgatcgggcagctccgacgataaagaatataactttattcagtcttccctggcctatggcgccaccagcaacatcactctttatactggtttccagcaggcggaagataaatacaccaacctgttgttaggcgctggctttaacctcggtactatcggtgcgctgtcgtttgatggctctcagtcgtgggccgacgtgaaaaccagcgatacggcctcgtcaaccagtaaagagcaagggcaatcgtatcgcgtccgcttcagtaaaagctttctgcagacgggcaccagcttttccgtggctggttatcgctactccacctcgggatattattcgtttcaggactttgtcgataactcttccacacagggcgactgctgtacgcagagcggcagaacgaaaggccggtttgacgcatcgctgtcgcagacgctgtttggctatggttcgctctcgctttcgttggtcaatgagacctactgggacagttcgcgtatggaatcggtgggcgtgggctatagcgggtcgattggcaaggcctcctactttattaactattcctataaccgcaatgtgcaaagcacagatgacagcgacaataaccggccggccagcgatacggtcgtctccctgacgttaagtattccgcttggtgagacgctctcggcaaattacaccatgaaccatggtcggcataacgataccacgcacagcgtggggctcaacggctcggcgtttgaggatcgttccctgaactggagcgtactggaagggtacaacacgcaggataaaagcacctccggcaacctcagcgtcaactaccagggctcgaaaggggatgtggctggcggctatggctacgaccgctacagcaatcactacaactattcgctgcgcgggggcatggtcgcccatgcgggcggactcacgctatcacgctttcttggcgagagttcagcgctggtcgaaacgcctggcgtcagcgatgtgacagtgcgcggtcagacaaacgtgacgacggatgccgccggatatgcggtggtgccttacgtccgtccgtaccatcgtaacagcctggcgctggatgaacaggaaatacctggcgctgaagtggataacgtcgccagaacggtggttccgacgcgcaatgcgatcgtcaaagtgaagtacgacacgcgaattggctataaggcgatgctcaccctgcgtacccgcaatggcgtggtgcctttcggcgcgctggtgaccctcgataatgatcacggtagcgcgtcgcgcagcaatatcgttggcgatgaggggcaggtgtatctaacggggctgcagaaaaaaggccagctgttagcgcgctggggggagaaaagcagtgagcagtgcaccgttcattatgacttctccggcatggcccttggcgacgatattctgttctatcaggccgaatgtcggtaatggatgcaggttttcaacatggaagaggggctgatatgaatatgcgagacggcagcacaaggggcctcctggtggccattttgctgctctcccttccggcgctggcttatgagggcagcagcacggtcaattttaacgtcacgggcaccatcgaagcgccttcctgtgaggtggccgtggagccgtcgaacagtatcgatttaggcaccgtctcctcgcagacgttctccggacatgccggggcgagcggcgccagcgtgccggttaagctggtcttttccagctgttccgccgatgcgtcggcggtgaccatcgcgtttagcggcaccagcttcgatagcacccacgcttcaatctataaaaacttccagactggcagcaacggtgccagcggcgtcggtttgcagctgcagagcatggccgaccagcagccccttggccccggcgaccagtatctctatacctttggggacgatgcggatatccatacctttaatatggtggcacgtatgttttcgccttatggccaggtaaggtccgggatggtcgggtttaccgccacgttcgatgtggcctacaaataacgtttcgacagggatgggtatgaaaaaactgatcttattgctcatattggcactgtgtcccgtctatagctgggcggcctgcacgggaaccaactatggcgatgtctcgatgaccaacctgccggaaaagatcctggtcaatgccgggagctataccgcagggacggtactgtatgacacggggaagattacgcgctcgcaaacggaattgcttaactgtgaggggagcacctacgcggtttttgcctggtcctcgaacaatgccggggcactgataggggataatatctatgccacctcggtgcaggggatcggtatccgcgtcaaggtgtggctcaatatcagcggtgaatatggcgatgacaccgatgatttcagccccgactcgcaggtgcattatattggtgatgtgaattattacctcggaaagccgacaggtcttttcgactctttcgcgtcgactcattataccccggcgtatcagctgcagctggtggccaccggcggcgccatcgccagcaagagtcaattatcgttcagcgacccggtggccacggtatcggccaaggataaaaaggggaccatcgctatttcacaactgcacatcagcggcaccaccagcatccagctaatcccgatggggtgtattgtcggtagcaataatctcagtttttccatgggcagcatcaatgccagtgagtttaataccgcgacgaaggtgggtagcgcgcggcagtctctgagcctctcctgcgagccgggaactaacgtttcgatgcgtgtggcggctgcttctgcaagcggggataaccctgacaatacggtgatggccctcacggcggaacagaatgccgccactggcgtgggagtgcagttaaatttgaatggcaaagcactgccgttaaataccgatatcagcctctatacttcgagccgcgcgacggtgaccaacagcggcgcggatgccagctacagctatttcaccaaccccgacagccccggaggcgcagcggccatgcagacgctcgccttatccactaactattacaggacggggagcgcggtgaccgcggggacagccaacgccaccggggtgatcacctttacttataactgaggggagaatcccttccccgaacgatgccggggaagggagaggacgattaatgcgcctggccgcgttcgataccgatcccggtttgtgaacggataaactgggcgcggaactgctcgcgctcgcgcatcccttccggtgagttatcggtggcggagaagacccagatgccaatgaacgcgatggcaatggagaacagcgccggatattcatacgggaacagcgctttctcatggccgaggatctgcacccaaatggtggggccgaggatcatcagaatgaccgcagtcagcaggcccagccagccgccgaccatcgcgccgcgggtggtcagcttcgaccagtacatcgacagcagaataatcgggaagttacagctggcggcgatggagaaggccaggccgaccatgaaagcaatattctgattttcaaacagaatacccagcagaatggccaccaccccaaggatcagcacggtgatcttggagaccttcagctcctgacgctcggtcgcgcccttgcggaagacgttggcgtacaggtcgtgcgacactgctgacgcgccggcgagggtcaggcccgccaccaccgccaggatagtggcgaaggctaccgcagagataaagccgaggaacaggttgccgccaaccgcatccgccaggtgcaccgccgccatgttattgccgccgataagctgtccggccgcgtctttaaacgccgggttcgcgccgaccagcatgatggcgccgaagccgatgataaaggtcaggatatagaaatagcccataaaaccggtggcgtagaagacgcttttacgcgcttctttggcgtcgctcacggtaaagaagcgcatcagaatatgcggcaggccagcggtaccgaacatcagacccagacccagagagagcgcggatatcggatctttcaccagtccgccgggactcataatcgccgcccctttcgggtggaccgccatcgcctcggtaaacaggttattgaagctgaagccgacgtgcttcatgaccataaaggccataaagctggcgccgcacagcagcagaaccgctttaataatctgcacccaggtagtcgccagcatgccgccgaacaggacatagagcaccatcagcacgccaaccagcactacggcgacatggtaattaaggccgaacagcagctggattagcttgccggcgcccaccatctgggcaatcagatacagggccaccaccaccagcgaaccgcaggcggagagggtgcggatcggcccctgcttcaggcggtaagaggcgacatcggcaaaagtatagcggccaagattgcgcagacgttcagcaattagaaacaggataatcggccagccgacgagaaagcccagcgagtagatcagcccatcgtagccggaggtatacaccagcgcggagataccgaggaacgacgccgctgacataaagtcgccggcaatcgccagcccgttctggaagccggtaatattgccgccggcggtgtagtaatcgctgcgcgaacgcacccgttttgaggcccagtaggtgatgtacagcgtcagggcgacgaaaatcaggaacatgacaatcgcctgccagttggtcggctggcgctgtaccgcgccggtaatagcgtctgcggcgtgagcgccgaggggcagcagcgtggcggcgagcgccgtcaggactctcttgatcatgcttttacctcgttgagaacgcttttggtcaaacggtcgaattcaccgttagctcgccagacataaataccggtcaggataaacgaaatgacgatcacgccaatgccgagcgggatcccgcgggtgacgctggttccggcgtgcagcggggtgccgagccagccgggtgcaaaggcgataagcaaaataaagcccacgtagatcactaacataatcactgacagaatggcggcaaaccgttgccgtgatgcaactaactccctgaaatgcgcactattttctatccgctgacaaagttgttcattcatcttagcgtctccagaggtctccctttcgtcatccactcggcggacgctggcgacagcaacccctccggcgacggagccgggacaggtgttgctgacggcgttcctgcgagtgaaatcctgggggagggacttatttttatcctctccccggaaggggagagggtgtagggaatcggtccttacttacgatggcatggtaatggcctgcttctcttcgagcagtttttccacgacgccaggatcggcgagggtcgaggtatcgccgaggttgctggtgtcgcctgcggcaatcttacgcagaatgcgacgcatgattttgcccgagcgggttttcggcagcgaatcggtccagtgcagcacatccggtgtcgccagcgggccgatctctttgcgcacccagttacgcacttcggcatacagctccggcgttggttcttcgccgtgattgagcgtcacgtaggcatagatggcctggcctttgatgttatgcgggatccccaccaccgccgcttcggcgatttttgggtgcgacaccagcgccgattcgatctcggcggtccccagacggtgtccggagacgttcaggacgtcatccacccggccggtgatccagtaatagccatcttcatcacgacgcgcgccgtcgccgctaaagtacatatttttgaaggtggagaagtaggtttgctcaaagcgctcatggtcgccgaacagggtacgcgcctggccgggccaggagtcggcgatggcgaggttgccctcggtggcgccatccagcggcaggccttcgttatccaccagcaccggctggacgccgaagaacggacgcgtcgcggagccggccttcagctcaatcgcgcccggcagcggagtgatcataaagccgccggtttcggtctgccaccaggtgtccatcaccgggcacttctcgttaccgatcttcttccagtaccactcccaggcttccgggttaatcggttcgccgaccgagccaagaatgcgcagcgaggagcggtctgtgccttcgatagctttgtcgccttccgccatcagggcgcgaatagccgtcggggcggtatagagaatgctgaccttatgcttatcgacgacctggcacatgcgcgccggcgtaggccagttcggcaccccttcgaacatcagggtggtggcgccgcaggccagtgggccgtacagcagatagctatggccggtgacccagcccacgtcggcggtgcaccaataaatatcgcccggatggtagtcgaaaacgtatttaaaggtggtggccgcatagaccagatagccgccggtggtgtgcagcacccctttcggtttaccggtggagccggaggtatagaggatgaacagcggatcttcggcgttcatttcgacgggccggtgttcggcgctggcgttcgcaatcaggtcgctccaccacagatcgcggccttcctgccagtcgatattgccgccggtgcgtttcaggaccaccacgtgctcaatgcttttcacgttcgggtttttcagcgcgtcatcgacgtttttcttcagcgggatggcgcgaccggcgcgcagcccttcgtcagcggtgatcaccaggcgtgagctggagtcgataatgcgtccggccaccgcctccggcgagaagccgccgaaaatgaccgagtggattgccccgatgcgggcgcaggccagcatcgccaccgcggcttccggcaccatcggcatatagatagcaaccacgtcgccttttttaatcccgaggtcgagcagcacattggcgaaacggcacacgtcggcatgcagttcacggtaggtgatgtgcttgctttggctggcgtcatcgccttcccagatgatggcggtttgatcgccgcgttcggcgaggtggcggtcgagacagttagcggcgaggttcagggtgccatcttcataccatttgatggaaatattacccggtgcgaaggaggtgttctttacacgggtatagggccgcatccagtcaaggatcttgccctgctcgccccaaaatgtatcagggtcggttatggattgttggtactgcgccttgtactgatccgggttaatcaggcaacgttccgcaatattagcgggaatagggtgtttgtgaatttggctcatggctttttttctcctttgaacttgttaaatatatgtcaaacaaacgttaagagtaggggttttgacagctttgtttgttaattggggggcagatcacgcaatgattaaactgggtgaaatttcatcaaatgaaactttgaagcgaaataattacgcaaatgaatttatagaaacggaagctgtgaaaatttttttattacaaatacttatgcaatataattgggggaaattcgctgctttatgcataaaagcagaggaaagccctgttcttaaaggcttgcgcagcatgccgtgcaaatgatactgatattgcgcgttaaataaccccacaaagcaacgcaacacaattcataccccctgcagtgggtaccatgacgaaaaggaatggtgcctttcattgaggaagtcagtagtgaagaaaacaaaaaaagtcagtctggcctggcaaattttgctagccctggtgctgggtatccttctgggcagttatctgcattaccacgctgaaagtcgcgattggttaattagcaatttgctgacgccggcgggcgatatctttatccatctgattaaaatgatcgtggtcccgattgtcatttcgaccctggtggtcgggattgccggcgtgggtgacgccaaacagttagggcggatcggtgccaaaaccattatctatttcgaagtgatcaccacggtggcgattgtgctgggtatcaccctggccaacgtcttccagccggggacgggcattgatatgtcgcagctggcggcagttgatatttcgaaatatcagaacaccaccgccgaagtgcagagccatgcgcacggtctgatgggtaccatcctgtcgctggtgccgaccaatatcgtggcatcgatggcgaaaggcgatatgctgccgattatcttcttctcggtgctgtttggcctggggctctcctcgctgccggcgacccaccgtgagccgctggtgacggtcttccgctctatctccgagaccatgtttaaagtcacccatatggtgatgcgctatgcgccggtcggggtattcgccctgatttcggtaaccgtcgccaccttcggtttcgcctcgctgtggccgctggccaagctagtgttgctggtttactttgcgatcctgttcttcgcgctggtggtgctggggattgtcgcgcgcctgtgtggtctgagcatctggatcctgatccgcatcctgaaagatgagctgattctggcttattctaccgccagttcggagagcgtactgccgcgcattattgagaagatggaagcctacggcgcgccggcgtcgatcaccagctttgtggtgccgaccggttactccttcaacctcgatggttcaacgctgtatcagagcatcgcggcgatctttatcgcccagctgtacggtattgacctctctatctggcaggagattaccctggtgctgaccctgatggtgacctcgaaagggatcgccggcgtgccgggcgtctccttcgtggtgctgctggccaccctgggtagcgtcgggatcccgctggaagggcttgcctttattgccggcgtcgaccgtatcctcgatatggcgcgtaccgcgctgaacgtggtgggtaatgcgctggcggtgctggttatcgccaagtgggagcataagttcgatcgcaaaaaagcgctggcctatgaacgcgaagtgctgggcaagtttgataaaaccgcccaataaaacacaaagcccggcgcgatagcgccgggctttttcttatcctttactgatccggtcaaactcttcgcagccggtatcaaacccctccaggcaactgacgttgagccagtgcagcgccttctgcttattcggttcgataaagcctttctctccctgctggaacatcatcccggcccagtattcggcatagccggtgcgggaaagtgatgaactgcctttgaagtattcgcttgctttcacatcatcctccgggccgtgtacgccgctggcgtagatcagccccagcagcatctgggcatctaccgccgcatcgctttcgctatcccgggctgcatcctgcagcagcgtgatggcgtgcgctacgtcggtggcgccagcctgacggttgaccagcacccgcgcgaggacgatttctccggatttactgccggcctcgacggctttttccgccagctggcgggcctgcggatagtccgcctgttgggggttacggattttgagctgcgccagcagcgccagcgcatcgccatcgccctgggcggccgccttctgcgcccagtattcggctttttgataatcgccggagctgacccaggtatcggcaaggtaatattgcgcgcgtcgatcgccggcttcggcctgctgttgatactgactgccaggttcggtggccaccgctgcgccgctggtgaaaaccagtagaaataaaaagaggtatttcatttgtatttattatcagtaaggaacatagcgcgcagtataaagggaggcgaaaaagaagaaaatggcgggtatcggtaggtagggccgatttgcgctacctgaccgtaggcccgcgcaagcgcagcgccgccgggcgacagactgtggacacggagccgtttatgtgccgggtggcggctgcgcctgacccggcctacgcatcgcgcgagccgggtcagaccgccgaaccttaacccatcgcgctttcgcgcaggcgggatttcagcttgttgtactcgtcgatcacgtactgttccgcggcgcgctgatcggcaatccgctcaacgttgaccgcgcagtacttgtactccggcgttttggttatcggactcaggttctctgagaccagttcgttacaggcgccgatccaccactggtaggtcatgtacaccgcgcctttattcggccgatcgctgacctgcgcgcgggtgatgatgcgccccttacgcgaattgacccataccagctcttcatcttcgatgcctagccgttcggcgtcggcggtgttgatttgcgcatagcctggttcatccgccagcgccgccagcgccgcgcagttaccggtcattgaacggcacgagtaatggccgacctcgcgcaccgtcgacaataccatcgggtactcatcggtaagcttatcgatcggcgcgacccagtcgcaggtgaagaactgcgccagtccgttcggggtatcgaacttctctttaaacagatacgacgttccctgatcggcgtcggactcatcgcggcacggccacatgacatagccgagctcacccattttctcgtaggtggcgccgtagaagtccgggcacagatgccgcaactcgtcccagatctcctgggtgttattgtaatgcatcggatagcccatccgggtggcgatttcgctgatgatctgccagtcggttttcaggtcccacttcggctccaccgctttaaagaagcgctggaagccgcggtccgctgcggtatacacgccttcgtgctcgccccacgaggtggacggcaggatgacgtcagccgcggaggcggttttggtcatgaaaatgtcctggacgataaccagttccagatcgtcgaacgctttgcggaccgccgagagttcggcgtcggtctgcagcggatcctcacccataatgtacgccgcccgcacttcaccgtgcgccgcgcggtgcggcaattcgctgatgcgatagccggtatgcgcaggcaggctttccacgccccaggctttggcgaatttttcgcggttctccgggaacttgacgtactgatagcccggataggtatccggtagcgcacccatatcgcaggcgccctgaacgttgttctggccgcgtaccgggttgacgccgacgctcggcttgccgaggttgccggtgaggatcgcgaggctggtcagcgaccgcaccgtctccacgccctggtagaactgggtgacgcccatgccccacaggatggcggcggatttggcgctggcatacatccgggcgcaggcgcggatctcctgggcgctgaccccggtgatctcctccaccgactccggcgtatagccttcaacgattttgcgatactcctcgaagccttcggaacggctggcgacgaaggatttatcgtacagatcctcttcaataatcacgtggccaatggcgttgagcagcgcgatgttcgagccgttcttcagcgcaatgtgcatatcggcgatgcgcgcggtttcaattttgcgcgggtcgcagacgataattttcgccccgttgcgtttagcgttaatgacgtgattcgccacgatagggtgggaatccgccgggttgtaaccgaagataaacaccagatcggtgttatcaatctccgtgatggcattactcatggcgccgttaccgaccgactggtgcagacctgcaaccgaagggccgtgtcagacgcgagcgcagcaatcgacgttattggtgccaataacggcgcgcgcgaatttttgcatcacatagttggtttcattaccggtgccgcgggaggagccggtggtttggatcgcatccgggccatatttggctttaatggcgctgaggcgggtggcgacgtaatccagcgcctcgtcccaggagacggcttccagcttgccgccgcgttgacggcggatcatgggggttttcaggcgcggcgttaggatctgggtatcgttaatgaagtcccagccataatagcccttcaggcacagggttccctggttggttttcccctgcgccgcttcagcccgaacgattttgccgttatcgaccaccaggttgattttgcaacctgatgcgcaatacgggcaaaccgtgacgacttttttcatcggtcttgctccagttattcaatgggcgcgtttgcgctatcgcgccgtcactatgcatcttctatgccatattttcattgtgggtattccttgatgatacgcgggttttttgggcggaatgctgacgaaaaacagcctgtcgacagatttgacgtgtcgataccctggagatgtgacggcgcttgaaaaaatgtcaccgggagaggaatttgtcggcgcaggcttgcaaaatcgatcagactgacactaattcccggcgggcagaggcaaaaatgaaaccagtcattttagtggtggatgatgacagggcaatgggcgagctgctcagcgatgtgctcggcgcgcacgcgtttgaagtgcttgtcagccagaccggcaacgacgcgctgacgacggtggcgcagcgggcggatatcgcgctggtcttactggatatgatcctgccggatacccatggcctgcaggtgctccagcagctgcagcgcacgcggcctgagctgccggtggtgatgctctccggtctgggcagtgagtctgatgtggtggtgggcctggagatgggcgccgatgattacatcgccaaaccgttcagctcgcgggtggtggtcgcccgggtgaaagcggtactgcgacgcagcggggcgctggccggcgaggcgtcgggcgccggtgctggcctgacgtttaacggctggcggctggataccacgcgctgtgaactgtataacccgcagcagcaggcgatcccgctgacccagggagaatatggcctgctgctggcgctggcgcagaacgcgcgccgggtattgaatcgcgaacagctgctggcgctgactcataatgaaagcaccgaggtattcgaccggaccattgatgtgctgatcatgcgcctgcggcgcaaaattgagctcaacccgcatcagccgacgttgattaaaaccctgcgcggtctgggctatgtcttttccgccgacgtgacccacagcgagaaggcggcgtagggcgggtttgctgccaacccgctgttgactttatttggcgcagggagtttactttttttattaaagtgacactctgggttaatctatggcaacaaaattaaactggctgctgcaaaacagcgctcccggagatgtgatccttcagtcctggttaagccagcatgccatctctccctctctggcctttaaatacgcgcaaagtggctggttaaaaaaaagaggcaacggcgtatatgcgcgtgcgggacgtgagccggagtggaacgatgcatttgcatgtttgcaaaatcagcttgccgctccggtgtatgttgcggggctcagtagcttagtctggcagggccgttctcactatctacagctaaaacaaaaccagtgctggcttagtgtggaaaataaagcgctgctgccgaaatggttcagggaattcccgggtgtggagtggatagtcatatcggggaaaaaactgccggtgctggatgatagataccgtgtaacgcttgatataaaagggaaaaaactcatcggcagtgcgccagaactggctgcttacgagttgctgagcgcggtgccggggaccctctcatttaaccacgctgcagagcttttccaggggctggttaatcttaatcctcgtaaagtagagtatcttctttccgtcagccagtccgtgcaggccaagcgtttgtatctcttcttcgccagtttttacgagcatggctggctcaaacgaatcgatagccaaaaaatcgatctgggagcgggcaagcggcaaatcgtggaaaatggaaagttcaatgctcaataccaaatcacagtgcctgaacgctttcaaaaggaataaaaaatatggatatacaggcgccttattatcggcaggttgctctgctaatgcaggttttaccctatgttgctgtcgaacgggaatttgcgctgaaaggtggcactgccatcaatctctttatccgcgatttccctcgattatcggtggatatcgacctcgcctgggtgcccctggaaagcagagccatcgctttacctcatatacgggatgcgcttgcacgtattgccgccaatctgcaacaacaggcaggtatgagcgctgtattacaagctaatcgttcagatgagatgcgtgtcattgttactaccgatagcgcgcaaataaagatagaggtttcaccggtcgcccggggaacattatatccaccacaggagcgagaagtggtgggggcggtagaggacgtttttggctatgccagccttccagtggtttcgttgcctgacctctacggtggaaaattatgcgcggcgctggatcgccagcatcccagagatttttatgacgtgaaattacttcttgatgcgcaggagcttgaccgtcccattttcaatgggtttatcgtgtatttactgagccataatcggcctctggctgaagtgctgaatcctcgctggaaagatattgctgaacctttttaccgtgaattcagcgggatgacatttgagacgatagccctggaggaactgacagcagtccccaacaggatgattgctgcgttaaaatcctgtttcacacaacaggatgtcgattttttactgtcatttaaacgaggcgaaccagactggcgtttagcgccggaaatgcgtattcaggatttgcctgccgtgcagtggaaattgcgcaatattcatcagatgccagcgataaaacgcgctgagtcattagataaactggaaaaggtgctggccgagtggcgcagttagttacctggcccgcccttgttgaactcagcgtaaaacaggcgtgatttgaataaaccgtatcccttttctcgccatgacacgccgttctcctgtggcatcgccctgatagcgggatctactcgatctaaccattctgcaattgtataaacgcctgcagctcagggagcgttttggcgccgtcgatcgcgttggcggcctgcaggctggcgcgggcgcaggcgtgagccagctgcagactggcggttaacggccagcgttcgtgactgccatacagcaggccggcgcagaaggcgtcccccgcgccgacgctgccgataatctcctccggcggcagccgccatgacggtacccagcgcccggcttcggtacgggagacgccccatgccccctccggacaatggatcactacccgctggcgtacgccggcgtcaagcaatgcgctggcggcgcgggcgatattggcgacgtgcggctcgccgttgggtagacgaatctccagcccgctaaactcgctggcttccagttcattgatggtcaggtagtcaagatgcttcagcgccggcaggaccagcggccggtagcgcgggtcgcccttgcgcgacaccagatcgagggacacctcatagcctcgctcgcgcatctgcgccagcagtcgcgcgctgcgggtgccgtacacttcatcggggcgatcgaggctttcgagcagcagcagatagccgagatggaaaattttcagcggcgcatccagcggctcaaaagccgggagatcaagcaggcggttggcgccgggagagtgaaagaaagtgcgctggccttcggcgtcggtcatcacctgggtcatcgaggtgggggcggagctggtgcgctgtacgagctggcgattgatatggtactgatcgagcatggcggtgatatagtcgccatcgttatcctcgccaatcaggccgaccgcctgcagcggcagcccggcgtgcattttggccagggtcagcaggacattcagcggcgcgccgccggtggcgcgttcgctatggacaatttccaccagccagccgcgctccggccactgcccgatctggtggacatgatcgaccagcatgttgcctgcggcaataatgcctttccgttccatgatcgctactccgcgccgtcatattcgttaagcgtagcgcacaatcggcggaacgattgtgcgcctggttgcgcttatttcacggtccagcctttgtaagagctgacgttatttttgtcgatcatcgtcaccgggatcagtaccggcgcggtcggcgcaggtttgccctgcaggatgtcgtagccaatctccaccgccttcgccgccatcacctgtgggtcctgcgctggggtggcaacgaacagcgagttcttacgcttcagcgcctcttcgccgtccgggctgccgtcgacgccgacgatgaagaactcgctgcgctgcgcctgtttcgctgccagatcggcaccaatcgccgtcggatcgttgatcgcgaacacgccgtcaatcttcggattggccgccagcagggaggtcattacctccaggccgccttcccggctgcctttggcgttctggttggcggagaggattttaatgtccgggtgttttttgaactccgtttcgcagccttcgacgcggttttgtacggcggagaccggcggcccgttgatgatcaccacgttgcctttgttgttcaggcggtcgctaatgtatttacaggccagctcgcccgcctgggtgttatcggaggtgatggtggcgtcggccccttcggcggcgacgtcaaccgccaccaccacgatcccggcctctttggcccgcttcaccgccgggccaatgcctttcgaatctgcggcgttgaggatgatcatatcgactttggcggcgataaagttatcgatctgcgccacctgctggcccagatcgtagccgctggagaccagcgtcactttgacgttatcccccgccagcttgcgggcctccagctccgcccctttggtgatctgtacaaagaacgggttggcaaggtcgcccaccgtcacgccaatcgctttcagctctttggccgacgcaaaaggggaggcggccagcagcgcgccagcacacagcgcggtgactatcggttttaaacgcattcgcttttcctcgcaggtaagatgttgttgttatgcactttgatgatgtcgggtacggtatttgtcgatcagcaccgcaatgatgatcaccgcccctttgatcaccagttgccagaagtaggagacccccatcagggtcatgccgttattgagggtggcgataattagcgcccccaccagcgtaccggtgatggtgccgataccgccgacgaagctggtgccgccgagaatgaccgcggcgatggcgtccagctcgtagccgacgccgaggttgccgttggcgctgtacagccgcgaagcgctcatcaccccgccaaggccggagagcagaccgctcatgccatagacaaacagcagcaccagccagactttgatgccggtcagccgcgccgcctgcatgttgccgcccaccgcgtagatatgcaccccaagggtggtgcggcgcaggataaaccagcacaccgcgatcaccgccagggcgatgactaccagccagggcactgggccgaggtagtcattgccgatccactcgaagctgatatcggagttgatcaccgtggtgccgtcggccagcagataggcggcgccgcgcagcgccgtgtaggtgccgagggtgacgataaacggcggtagcccggcgaaggcgaccagcgcgccgttgaacaggccgagcagcaggccgagcatcagcgccgccggaatcgacagcaacgcaaacgccgggatcagcgacaccaccatcgcggccactgcggtggtgccaaggatggagccgacggaaaggtcaatgccgccggtgaggatgatgaaggtcattcccgccgccagcacaatgttgatcgaggcctggcgggtgatattcagcagattgctttccgtgaaaaagttgggggcgataaagccgaaaacggcgacgatcaggatgaggatcggcagaatgccgacggtctgcatcaggtcgcccatcaacatttttttcgccgaagcggatttcgcgaccggcgcggaggtctctttcggtatgctcatagttgccctgccttaaggtgagaatcggtcacgccggtggccagcgtcatgatactttcctggctaatatcaccggcctgtagctcgccggcgataacgccctcgcgcatcacatagacccggtcgctcatgcccaccacttcgggcagctcgctggagatcatcagaatggcgacgccctggcgcgccatgtcgttcatgatgcggtaaatttcgcttttcgcgccgacgtcgacgccgcgggtgggttcatcgaggattagaatgcgcgggccaatcgccacccagcgcgaaattaacagcttctgctggttgccgccggacagtccgccggcgcgcacctgggcgtgcggcacgcggatgttaagcaactggatggcgtcatcggagatggtttgcgccttccggcggttgagcatcccccaggtcgcgtcgcgctccagcgtcgccatggtgatgttttcctgggctgccagttcgagaaacaacccctgttctttgcggttttcggtcagaaagccgatcccgaggtcgatggcttcccgcggcgagtggatcaccaccggctcgccgtcaatctcaatcaccccggcggtggctttgcgcaccccgaagatcagctgcgccagttcggaacgcccggcgccgaccagcccggcgaggccgacgatttcgccggcatgcaccaccaggctgctgggcttaatcttgccgccatcggtcagatcctcgacccgcaggcgcggctggccgcggggaatgtcacgttctttattgaacagatcgctgagcggccgaccgaccatcatgcgcaccagctccggcgcgttgagcttgtcgcgcaccaggctgccgacatactgcccatcgcgcaggacgctgacccggtcggagagctcatacacttccgccatgcggtggctgatatagatgatcgccatcccctcatcgcgcaggcgcaggatgagctcgaacaggcgctgggtttcccgcgaggagagggcggcggtgggttcatccatcaccagaatgcggctttgacggtgcagggcgcgggcgatctccacctgctgttgttcggcgatggtcagggtcatcacccggtcgctggctttgaactgggcgccgagacggtcgatcaccgcctgcgcctggctgagcatggctttgcgctgcaccagaccaccgcgcgccagctcgctgccgaggaaaatgttttccgcgacggtcaggttcggcgccagctgcatctcctggtagatcaacgtgatcccggcggccagcgcgtccttggggccgcggatcgtttgcggttttccgtcgatcaggatctcgccgctggtggcggtataggcgccggcgaggatcttcatcagcgtgctttttccggcgccgttctcccccatcagggcatggatctcgccgggccagaccgtcaggtcgacgcccttcagcgcgtagaatttgccaaaagctttggcgatatggcgcatttccagtaccggggtggcggtcatcgcggcgctcctgtctgtaagaacaatagctgcagtccaccaccggaaaataaatgcagaatgtcagaatccattcatatttgtcatagtgataaatagttaaccgcgatcacagttacgcggcgtcattttctgcaccgtcacgcttatctgccgaccgatccttcaccggagttgttatgaccgctcgccgacacccgtttttcaccagcgcccgtggccgcctgctctcctttaatctgctgatgggcgtggtcaccctgttggtcagcggcgtggcggtgttcggctttcaccacgccagccagctgcaggagcaggtgcagcgccagactctcaacgacatgcgcggcagtatggatctggcgcgggacacggcgaatgtcgccacggcggcggtgcgcctgtcgcaggtggtgggggctctggagtacaaaagcgaagcggaacggctgctggcgacgcagcaggcgctgaagcactcgctggcccagctggcggcggccccgctggcgcagcaggagcaggcgcgggtggccaatattattcgccgcagcaacgcgctgcagcagagcgtggcggagatgctggagcgcggccagcgccgccatctgcagcgcaatgcgctgctgagttcgctttaccagaatcagagtaacctgcgccatctcgccgatcttaacgatcgcggcggggataaggcgatcgatccgcgccggctggccgagatggaccggctgatcgtggctgcgatccataccgtcacgccgcggtcgatcgtcctgcaactcgaccagctgcgcggcgccctgccgacacgcagcgccgatcccgcgctggcgtttgtcctccctgatgtgacccgcgaactggcgacgctggccccgctgtcggcccagctggaggagagcgacctgacgatcagctggtacatgtatcacatcaaagcgctggtcgcgttgcttaacgaagatatcaatcagtacgtgacccgggtggcggaagcctcagagcagcgggcggcgcagagccatcgggagctgcgctccatcagtatgtttattctgctttccgcgctgctggcgctggcgatcaccggctgcgccgggtggtacatctaccgtaatctcggctcgaacctgaccgccatctcgcgggcgatgtcgcggctggctcagggagagccgaacgtctcggtgccggccctgcagcggcgcgacgagctgggggagctggcgcgggcctttaacgttttcgcccgcaatatggcgtcgctggagcacaccacccggctgctgaaagagaagaccaaccagatggagatcgatcggattaagcgccaggagctggaggaggcgctgctgcatagtcagaagatgaaggccgtcggccagctgaccggaggtctggcgcatgactttaacaacctgctggcggtgattatcggcagccttgagctggtggagccggatgcgcgcgatgcgccgcgcctctccagggcgctgaaggcggcggagcgtggggcgcttctgacccagcggctgctggccttttcgcgcaagcaggcgctgcatccccaggcggtggcgatggcgccgctactggagaacctcagcgagctgatgcgtcattccctgccggcgaccttaagcctggagattgaggcgcagtcgccggcgtggccggcatggatagacgttggccagctggaaaatgccctgatcaatctggtgatgaacgcccgcgacgccatggcggggcgcgacggggtcatcaaaatacgcacctggaatcagcgggtcacccgcagcagcggccagcggcaggatatggtggccctggaggtgatcgatcatggcagcgggatgtcgcaggcggtgaaagcccgggtgtttgaaccgttcttcaccaccaaagccaccggcagcggcagcggcctggggctgtcgatggtgtatggctttgtgcgccagtctggcggccgggtggcgctggagagcgcgccggggcaggggacgacggtgcggctgcagctgccgcgagcgttgaccgaggttgagaaggaggtggcgccagcggtggacgagccgcccccggcgggcgagcggctggcgctggtgctggaagatgaagaggatgtccgccagacgctatgtgaacagctgcatcagctgggctggctgacgctggaaaccgccagcggtgaagaggcgctgcagctgctggaggcctcgccggatattgccctgttgattagcgatctgatgctgcccggcgccctgagcggcgccgatgtgatccataccgcccgacgccgctttccggcgctgccggtgctactgatcagcggccaggatttgcgtccggcgcagaacccggccctgccggaggttgagtggctgcgtaagccgtttacccgcgcccagctggcgcaggcgctgagcgcggcgtacgcgaggatttgagattcctccgctacccgggtttcatgcggatgattaaggtagcggcaggactctgatgagattggccccgatgaaacgttacgcaaccgcactgctcttttgcactctgtcgctgaccagcctggccgctcgcgccgatattatcgatgacgcgatcggcaatattcagcaagccattaacgacgcctataacccgggcagcagtcgctccgatgacgacgacagatacgatgacgatggccggtatgatgacgggcgctatcaggggagccgtcagcagagccgtgacagtcagcgccagtatgacgagcggcaacgccagctggacgagcgccgccgccagctggatgaacgccagcgtcagctcgaccgcgatcgtcgtcagttagaaagcgaccagcgtcggctggatgatagctactgatcgccccccgcaggccagcgtttaatccagcgctatttccatcccgtcatagcccgcttcgaaacctgtcggcagcgggttatccatcatccagacgtcaaactggtggctgatatgggtgaggatcacccgcggacagccaatgacctggttaaggctgcggacggtgtttagatcgttatggttacgcggggtctgcgcgcgcggctcatgactgcagtcgatgatcatcgcctgcgggcggttattgagcaaaaacttcagcgtcttgtccggcagcccggcggtatccgagagccaggccagccggctgtgggccgactccagcagataaccaaaggtcagcttcgagtgattaaggggtaggggcgtcacccgcagcccctgcaggttaaacatcacaaacggcgtgacggtatggctaaagtcaagcagaccggggtgtttgagcagatcgtcgcagccggcgtcatccggcgggccatagaccggaatcgacgcgccgactccccagcgcagcggaaatagcccctgcacatgatccagatggtagtgggtcagcagcacctgttgaaagctgccggcgggatgatgctccatcagatccggtcgtccggcatcaagcagcgtcacggcgctgttgaacgtgaccactccgctacaggggcggcgtcggtggctctcctcgcggcgggcgcggcggcaggccgcgcagtcgcagccgaagaccggcaccagctgagcgccgccggtgccggttaagcggagggtcaggctcatcgtgtcaccttttgtttataccagttgatccgcttcgcgcgccgcgtggctgcgcagcaggcggaaaaattcatcgaccgattgtcggagactgccgtcgttattcaatgtcaggcagttgtccggcttatagcgcgcggcgcgttccagacgctgggcgatttccagcgcgttttcccggccgcgctgctccagccgctggcgcagcaccggcggcgagacggcgagacagatcggcaccagaacctctccgtaacgttcccgggccagcgccaggtgggcgcgggagccgttggccaccacgtcaaagccggcgtgcagccagaggtcgatctccacgccaatgccatagtaagtattgttggcgtgccagctgagagcaaaaagatgctgctcggcgcgggtaaaaaactcatgttcgctgagggcgatatgattctcgctgcccgcgttaaacgggcgggttatgtaacgatgggccaccagcagctgcgggtgctcgcgctggcgcagcgccgccagcaggctatctttaccggagccggaggggcccaccagccaaatcagttttcctggcattaaaagaccctctttccctggcgccagacatggtcgatctggatatgttcgccgcgacggtgcgccagcaccaggtcggcgcgttttccctcggcgatgacgccgcgatcgtcaaggcccagcgcctgcgccggatgctgactgaccagacggatcgcctgtggcagggtgaaggcattgtcctcggcgtcggcgatgcggaaagcggcatccagcaggctggcggggtaatagtcagatgagaggatgtccagcaaaccgtggctcgccagctggtgggcggcgacgttgccggagtgggaaccgccgcgcacgatattcggcgcccccatcaggacgtgcatcccgtgctgacgtgaagcctgcgccgcggccagcgtggtgggaaactcggcgatcacgctccctagctggtgagattcggccacatgcgcctcggtggcgtcgtcgtggctggcgagggcgatacggcgggcgcggcacatggcggcgatggtctggcgattgggctgcgaccaggtggcggccagagccatctgctcggcttcaaaacggtccatttcgtcatgcgtcagatgatatttgccctgataataatcgcggtacttgctgcgatcggcgtactgacgctggcccggcgagtggtccatcagagagaccatgctcaccgactcgcgatcgatcagtttttcaaacagcggcagcgtggtgtgatgcggcagctcgcagcgcaggtgcaggcggtgttcggcgcggttgagaccgcgcttttgcgtctcctccacggcattgaccatcttctccagattctcaagacgatcgccgccatcgcgcacgtcgccaatcgccacggcgtccagcacggtggtgatgccgctggcgaccatcatggcgtcatggctgctcatcgccgagtgggccggccagtctaccttcggccgcggggtaaagaacttgtcgaggttatcggtatgcagctcgataaggcccggcagcagccagccgccttccccatccagcgcctgcggcagccggctctggctttcggcgaaggcgaggatgcgaccgtcatggacttccagcgaaccgtggaccacctcgtcgtcgagaaccagttttacgttattgataatcatgctgtcattcccatagagtgcagtcggtcggcgacctgacggcgtaccccttcgtcatggaaaatccccacgatggccgcgccgcgcgctttggcatcgtggatcaggttgaccacggcagcactgtttttgccatccagtgaggcggtgggttcatcaaggagcaggatcggatagtcgaccgcaaaaccgcgggcgatgttgacccgctgctgctcgccgccggaaaaggtggacggcgcaaggtgccacaggcgttccggaacgttgaggcgggtcaggagctgggcggctttcgcggcgctcgcttcgcgcggcgtcccaagatcgagcagcggctgcatcaccacctccagcgctgaaatgcgcgggatcacccgtagaaactggctgacccagccgatggtggttttgcgcacttccagcaccttgcgtggggtggcggtgaccaggtccacccattcgtcgccgtggcggatatggatatggccgctgtccggcagataattggcgtacagcgaacgcagcagggtcgatttgccgctgccggagtgaccgtggagcaccacgcactccccggcgttaacggtcagcgaggcgtcggccagcaccggcagacgcacgccgtgctgctggtgcagaacaaaggttttatggacgttttcaacgcggatcatgttagctctcacggggttgagttgccgggtggcgcttcgcttacccggcctacgaataacgcacctgtgggccgggtaaggcgcaaccgccacccggcaaaacagcattaattctgcaacaccgacgacaccagcagctgggtgtaaggatggtgcggatcgtcgagcacccggtcggttaagccactctccaccacctggccctgcttcatcaccagcagacggttcgccagcaggcgagcgacgccgagatcgtgggtaacaatcaccaccgccagattcagctccaccgccaggccgcgcagcaggtctagcagccgcgcctgcacggacacatccagcccgccggtgggttcatccataaacaccagcttcggctgggtgaccagattgcgggcgatctgcagacgctgctgcatgccgccggagaaggtggtgggcaggtcgtcgatgcgcgaggggggaatctccacctcctgcagccacttttcggcggtggcgcgaatgttgccgtagtggcgggcgccggtggccatgagccgttcgccgatgttgcccccggcggagacctggcgacgcagaccgtccatcgggtgctgatgcactacgccccattcggtgcgcaacaggcggcggcgttcggcttcgctcatggcgtacagcgagcgctgctggtacagcacctcgccctgctgcggcgtcaggcgggcggagattgccttcagcagggtggttttaccggagccggactcgccgacgatgccgagcacttctcccggccacagctcgagggagacatcgcgaaaacctttatccggggcgtagagatgagtcaggttattcacagcaagtaatggctggttcattttttctgcccctcgctctgctggcggcaatagtcggtatcggagcagacaaacatccgctggccgctgtcatccagtaccacttcgtcgaggtagctgtggcgcgagccgcagatggcgcagggctcatcccactcctgcacggtaaagggatggtcgtcgaaatcgagactctccaccggggtatagggcggcacggcgtagatccgcttttcgcgcccggcgccgaacagctgcagcgccggcatcatgtgcattttcgggttatcgaatttcgggatcggcgaagggtccatcacgtagcggccattgaccttcaccggataggcgtaggtggtggcgatatggccgaagcgggcgatatcttcatacagtttcacctgcatgacgccgtactcttccagggcgtgcatggtgcgggtttcggtttcacgcggctcgataaagcgcagtggctccgggatcggcacctggtagatcaggatctgatcctccaccagcggcgtctccgggatccggtggcgggtctggatcagggtggcgtcttcggtacgctcggtggtggcgacgccggtgacgcgcttaaagaactgacgaatcgacaccgcgttggtggtgtcatccgcgccctggtcaatcaccttcagcacgtcgttctcaccgatgacgctggcggtcagctggatgccgccggtgccccagccgtagggcattggcatttcgcgcccgccgaacggcacctggtagccgggaatcgctaccgctttgagaatagcccggcggatcatgcgcttggtttgctcgtcgaggtaagcaaagttatagccagtcagtgggttagccacgttcgttctcccgttgcaggtgtttcagcagcgccagttcggcctggaaatcgacatagtgcggtagcttcagatgcgagacgaagccggccgcttcgacgttatcggcgtgggccagcacaaactcttcatcctgcgccgggccggcaatctcttcgtcatagtccggcgcctgcagcgcacggtcgaccagcgccatggccatcgctttgcgctcgctcatgccgaaggtcaggccgtagccgcgggtgaagtgcggcggctcctcctgcggggcgacgaagccattaaccatctcgcactcggtcagcagcagctcgccaatattgacgctaaagcccagctcttccgggacgatttccacctgcacgtagccgctgcggatctcgccggcaaacggatggttgcggccatagccgcgctgggtcgaataggccagcgccagcaggtagccttcatcgccgcgcatcagctgctgcaggcgcgaggaacgcgagcaggggtagaccggcggggtgcgggtgatatcgtcgggcggcgtgccgcgatcttcctcggtcttcgccagcccctgctgcgtgagcaggctaaagacgtgcggcgtcggctctgcttcgccatcggcttgctgcacagacggcgcttcgccattggccagcagggtaaaatcgagcaggcggtgggtgtagtcgtaagtggggcccagcagctggccgccgggaatatctttgtacactgcggagatgcggcgttcgaggcgcatctccgcagtgttaatcggttcgctgaccgccagccgcggcagggtggtgcggtaggcgcgcagcaggaagatcgcttcgacgttatcgccgctggcctgcttcagcgccagcgccgccagttcgcggtcggcgatcccgccctcggtcatcacccggtccaccgccaggctgagctggtcgcctatttgttcgacgctcagttcgggaagccgtccatcgccccgtcgtttctgttcctgtaaggcgtgagcggcgcggatcgccttctcgccgcccttgacggcaacgtacatttagcacacctccacgtgggtggtgcgcgggatcgccagcaggcgctcgccgcaggtgaggatcaggtcgatgcccagcgggaacgggtgcgggcgttcggttaattcgtcgatgatgcagtccggcagctgcggcgcgatcattcgctcttcggcaatgcctgccccggtcaggcgcagcatgcgtccgccgctgaggctggcaagctgaacgatcagtgtgacgccggtttccggcgcggtgacggtgccagcggaaaggacgttgagctgctcggcgctgatgccgtcattggcgacggcaaagaccgcctgctgcggctggtccaccagcggcgcgccggtatgaaagcgcagattctgtcccaccagatcgttacgcagggcgctggcgagccagaccggtgtttcatgatcggcaagggtcaacagcaggctggtggaggccacgttcaatggctgccagccgtgctgaagctgctgcagggagacaatcacccccggctcgctcatcgctttcagcaggcgacgaaaactgtgttgggcatcctgcacagccagggtaaaagcgggttgtaaggtcatacgttatctccgcgaaccagggtaaagaagtcgacccggctggcgttgacttcggcgcgtcgggcttcaatgcgcgcgctgcgtagcgcttccagcggggttatcagggtttccattaaggtgtgaaaatggcggggcgactgcagcagggcgtcgatcgccgcgcagcgttcagcgtgcgggcggtcgcggcctaagatccagctgtaaccgagggtaccgtcagccaggcgtaccgctgcgcgggtaagggtggcgtcgccggcaaagaagcggtcgccgataccgcccatgcgggcctggagctgtaccagcccggtttccggggtgcgaatcaattcatattccggcgccagctgcagggactgcatgcgcgccagaaggtcctgcggttcactgtgggccagcacggacatccagcgctggcgggtggcggtatcgaagtgcattcagtgctccatggtaaattcaatcatgtcggcgcgggtcaggctgacggagtactccgctgtgaccgactcgccctcgcggctattgagcgtgcggacgcagagcagcggcgccatattggggatttccagcagcttgctctcttttgcctgcgcgcggcgggcgctgattttggtgcgtacgcgggtcagttcgacgtcgagccgatcgcgtagcagatcgtgcagcgagccgtggctgaaggtctgtagcaccggccagaagcgcaggtcggcgaagtagtggtcgatcaggcacagggcgacgccattgacccggcgcagggtacgcaggtggatcacgttctcgccctcattgatgccaaaggcctcggcgacatgggcgctggcggggcgcagcaccgacagcagcttttcgctggtgggatcgctgccttgttccagcaggttttggctgaagcgcgcctgggcgttaagcgggtagtcgatggggcgcatcagcaccagcacacccacgccctgacggcgctgaacccagccgcgctcaaccagctggtcgatagcccggcgcagggtgtggcggttaacgtcgaagcgtgtcgccagctgctgctcggcgggcagatagtcgccgcagcgatagtgatggcgcagctcctgctcaagtcgggcggcgatttcctgatagcgcgtggggtaactggtcggatgtctggacaggtgcatggtcatcaagcctcacacagcatagacgaggagcttcctcgcgttgtgggccgatcctgaccggtttatgttgcatttcggttaagtgacgatgaccaaaggatgaagagttgatgccaggcggatgacagggcggccgggccgccctgggggcgtcagccttgtttgaccacgttgatcatccaggggacgccaaagcggtcgacgactttgccgaagccgtgggcccagaaggtttcctgccaggccatctcaatgcgcccgccgacagccagcgcgtcgaaccagcgctggccttcagcgacatcgctgggatcgaggacgagggtgaagccggcgtaatgcacatcgggcccgaaggcgctgtcgctcagcatcagctcgccattattgatgcgcaggctggcgtgggcgatagcatcatccgccatcttctggccagacgggcagccgtctgacgcttcctgcgccgggggcggcatttcgccaaaggtcatttgaaacatcagctctgcgcccagcgtctgctggtagaaggcgatcgcctcggcgcagttgcccgcaaaggcaaggtagggacttaaggacatggtgaatacctcagtgaccgtaacccgtaaagcgtagtcgcccggcaggcgattgagccagacggcagggcgaaaaggggcgctgaaatatgacggcaggcgacagtgtaaatagcggttgccggcgagggaaataacaggatgcgccgggtgacaaacggccaccaggatatcgggagcggcgacggttatgtgaaaaaataattgcgccgcctacccgaaattaaatcagttctttttcacaaattccgatttgagcttcatcggaccaaaaccgtcaattttgcagtcaatattgtgatcgccttcgacaagacggatatttttcactttggtgccgattttcagcatcgaagagctgcctttaaccttcagatctttcacgacggtaacgctgtcgccatcggccagtaaattgccattggcatctttaacgatcagaatgtcgctctcttccgtcacctcggcagggttccactcatgggcacattccgggcagatgtacatgccgctatcttcataagtgtaagtcgaatcgcattttgggcagtgtggcagttgcatgacgctcctcatgatgtcgtcgaaaaacaggatgttggtcctttaaacagcggctgatagccgaaagtgggtatgattatagcgcaatcacccacttttgtcgggtgtttttttgctaaaaagtagccgtggtattattccgggaaaaagcgaataaacgctgaaattaaccgcccgaagtagagcaaaatcgacgaaataatttccgcgcgatcggcaggaaatgaacttatttattttccgacactctgtaatgaggcggtaaatttctgtgaagttgatcgcagatataaacactgttagggtaaaaaaggggagcaggtcaatttcatcaagcatcacgatgagccgctccatttattcaccagtagccagagcaggcgtcaacaggttcggttgtacattctgtcagcagacagtgcaggcaaacctgctacgcttgaaatgaggagcacagcaattcaccgctcctgacgcacgatgcgaatggccttgccattcggcgaagaggcgtgcactcaaggcggagtagcagaggaaaaatatgcttaaaaggaaaaaaataaagcccatcacccttaaggatgtgaccatcatcgatgatggtaaactgaaaaaggcgatcaccgcggcctccctgggcaacgcgatggagtggttcgattttggcgtctacggctttgtggcctacgccttaggtaaagtcttcttccccgatgccaacccaagcgtgcagatgattgccgcgctgggtaccttctccgtaccatttttaattcgtccgttaggcggcctgttcttcgggatgctgggcgataaatatggtcggcaaaaaattctcgcgataactatcgtgatcatgtcgataagtactttctgtatcggccttattccgtcttatgccacgataggtatctgggcaccgatcctgctgctgctgtgtaaaatggcgcaaggcttctcggtcggcggtgaatataccggggcgtcgatcttcgtcgcggaatactctcctgaccgcaagcgcggctttatgggcagctggctggactttggctccatcgccgggtttgtgatgggggccggcgtggtggttctcatctccagcgtggtgggtgaacagaactttctcgactggggttggcgtatcccgttcttcctggcgctaccgttaggtatcattggtctctacctgcgccatgcgctggaagagacgccggcgttccagcagcatgttgacaccatggagcagggcgatcgtgaaggattgcaggacgggccgaaggtctcttttaaagagattgccaccaagcactggcgtagcctgctgacctgtatcggtctggtgatttccaccaacgtgacttactacatgctgctgacctacatgccgagctatctgtcgcataacctgcactactcggaagatcatggggtgctgatcatcatcgctatcatggtcgggatgctgtttgtacagccggttatcggtatgctcagcgaccgtttcggccgtcgcccgtttatcctgattggtagcgtggcgctgtttgccctgtcgatcccggccttcattatgatcaacagcaacgtgactagcctgatcttcgccggcctgctgctgctggcggtggtgctgaactgctttatcggggtgatggcctcctcgctgccagcgatgttcccgacgcacatccgcttcagcgccctggccagcgcctttaacatctcggtgctgattgccggtctgacgccaaccctggcggcgtggctggtggagaccacccaaaacctgatgatgccggcgtactacctgatggttatcgcggtggtgggtatggcgacgggcctgtcgatgaaagagacggctaaccgtccgctgaaaggggcgaccccggcggcgtcggatatccaggaagcgaaagaaatccttggcgagcactacgataacatcgagcaaaaaatcgaagatatcgatcaggagatcgccgatctgcaggcaaaacggtcgcgcctggtgcagcagcatccgcgtatcaacgactaaccgttttcactgctaatcatgccgcctggggaaaccccggcggcattttttatgcctccggcaaggccaggccgtgacgccgctgctggctgagtttacggtactgctgcggcggcatgcccacgtagcgggtaaaggtgctgtagaagcggctgctggagcgaaaaccggcggtaagggcaatatccaggatggtcttgtcggtatcgctcagcagcgcccgcacatgattgatacgcatggcggttatgtactgcttcatggtctgctgcatcacccgctgaaagacccccatcgcgtagttcgggttgagcttcacgtgctcggcaacggcattgacggtcagcgcctggtcgtagtgggcagcgataaactccagcatctggctgacataaaactgcgcgtggcgcgagacgctgttcttgtgggtgcgtgaggttttattgaccagaatcggctgccagccggcgaggctcagccgcttcagcatcagggcgatttcatcgatcgccagctggcgtatctgttcattctcgtggctcagttcctgctgccagcggcgtacttcgaaggcgctcaactgctgcgcggcgagggatttaatcaccatcccatgggtgacgtggttgataagctcccggtccagcggccatgagagaaacagatgcatcggcaggttgaatatcgccatctgctggcaatcgccggggcgggtcagctgatgcggcgtacaggcccagaacagagtgatatagcctttctcaatgcgcaccacttcgttattaatcaaatactccacgtcgccatcgaacggcacgttgacctccacctggccgtgccagtggctggtgggcatggcgtgcggcgggcgcagttcgatatccatacgctgatactcggagtagagcgccagcgggctgcggctctgcttttcgtcgctgctgcacataaagggatcggggggcagagaggtgaagcggtgttccatcgttagcgtattcctgaattgtcagagtggctgcatttttcgccagaactgacgacagcttagcggaagaatcggcccattttctctcctttttgctcaatctgttcccgaaatctcagattttgtggcgcttaatggccgatctgagctttcgggaatgctccggcgggaacagggcagcgcagcggggagcggcgtgccactctgcaagtgttcaatgacctgatggagagtgcgtgatgtctgccccaaaaattacttttatcggcgccggttcgacggtgttcgtcaaaaatattctcggtgatgttttccagcgcccggcgctgaaatcggcgcatatcgcgctgatggatatcgatgaaacccggctggaagagtcgcatatcgtggtgcgcaagctgatggattccgtgggcgcgaacggcgaaatcagttgccaccgcgaccggaaaaccgccctgcagggcgccgattttgtcgtcgttgccttccagattggcggctatgagccctgtaccgtcaccgattttgcagtctgcaagcgccacggcctggagcagaccattgccgatacgctggggccgggaggcattatgcgcgcgctgcgcaccatcccgcacctgtgggctatctgcgacgatatgagcgaggtctgcccggacgccaccatgcttaactacgtcaacccgatggcgatgaacacctgggcgatgtacgcccgctacccgcatatcaagcaggtgggtctgtgccactcggtgcaaggcacagcggaagaactggcgcgcgacctcgatctcgatccggcggatttacgctaccgctgcgcggggattaaccatatggcgttctatctgtcgctggagaaaaagctcgcggacggcagctacgtcagtatctaccccgacctgctacaggcctacgccgacgggcgggcgccgaagccgaacctgcacggcaacccgcgctgcgaaaacatcgtccgctatgaaatgctcaaaaagctgggctactttgtcaccgagtcctcggagcatttcgccgaatacacgccatggtttatcaagccgggccgcgatgaccttctcgctcgctataaagtgccgctggatgaataccctaaacgctgcgtcgagcaactggccaactggcatcaggaactggagagctataagcgcggggagcgcattggggtgaaaccctcccgcgaatatgccagcaccatcatgaacgccatctggaccggcgagccaagcgtggtgtacggcaacgtgcgcaacgataatctcatcgacaacctgcctcagggctgctgtgtggaagtggcctgcctggtggacgccaacggcatccagccgaccaaagtgggcgcgctgccggcgcatctggcggcgctgatgcagaccaatatcaacgtgcagacgctgctcacgcaggcgatcctcaccgaaaatcgcgattacgtctattacgccacgatgatggatccgcacaccgccgcggtgctggggatcgaagagatctacgcgctggtggacgatctgatcgccagccacggcgactggctgccggcctggctgcaccgttaatcctcttatgccgccgggggcaacgaacccggcggtgcctgtcacgctctatcaaacgctgaaggaggcgctggcgacagcgacctggaccctatgagtatttcaatgacaacaaagctcagctacggatttggtgcctttggtaaagatttcgctatcggtatcgtctacatgtacctgatgtattactacaccgatattgttggcttatcggtcggggtggttggcaccttgttcctggtggcaaggatcctcgatgcgatagccgatccgatcatgggatggatcgttaactgtacgcgatcgcgatgggggaagttcaaaccgtggatcctgatcggcacgataaccaactcggtggtgctgtatatgctgttcagcgcccaccacttcagcggcggggcgctgctggcgtgggtgtggctaacctacctgctgtggggcttcacctacaccatcatggatgtgccgttctggtcgttggtgccgaccattaccctcgataaacgcgaacgcgagcagctggtgccttacccgcgctttttcgccagtctggcgggatttgtcacggccggcgtcacgctgccgttcgtcaacgccgtcggcggcgccgatcgcggtttcggttttcagatgttcactctggtgctgatcgccttcttcgtcgtttccaccctcgtcaccctgcgcaacgtgcatgaggtttactcctccgacagtggtgtgagcgaagactccagccacctctcactgcgccagatggtggcgctgatctataaaaacgatcagctggcctgcctgttaggcatggcgctggcctataacacggcggcgaacattatcgctggctttgcgatttactactttacctacgtgattggcagcgcggagatgttcccgtattacatgtcctacgccggggcggcgaatttgctgacgctgatcctgttcccacgactggtaaaagggctgtcgcggcgcattctgtgggcgggtgcttcgatcatgcccgtgctgggctgcggcgtgctgttgctgatggcgctgggcggcgtttacaacatcgcgctgatttcgctggccggggtgctgttgaatatcggcactgcgctgttctgggtgctgcaggttattatggtggccgataccgtcgactatggcgaatatacgatgaatatccgctgcgaaagcatcgcctattccgttcaaacgctggtagtcaaagccggttcggcgtttgcggcctggtttatcgccatcgtgctgggtatcatcggttacgtgccgaatgttgtgcagtcgccccacacgctgctggggatgcaggcgattatgattgcgcttccgacgctcttttttgccctgacgctgtttctctatttccgttattacaaactgaatggcgatatgctgcgacggattcagattcacctgctggataaatatcgccgggtaccggaaaatgacgtcgagccggaacggccgattgtggtacccaatcaggtgtaaaaagcgtgcgaaaaccgctgacgaaagaggggagggatgctctctttttgagcaaaaaacagtgtcttaaaaaaacagaaagagaaaaatttagttctctattttatctcaattatttctctttttgagcgttctggactgtttgtttctccgattgttctcaaataaaactcagaattgtctctttttcgtgctcttgcgctgctttttaactcttgctactctttttgggtcttacatttttctcttatttgtctcagtgatggagcaatgcaatgcgcatttttatcgatgatggttcaaccaatatcaaaatgctgtgggagcaagatggcgaaactttcacccatatcagccccaacagttttaaacgcggctggtctgccaccttcggttcggggaagccttttaactacacggtggatgatgaaaagtactcattcgacctgatcacccccgatgcgctcccaaccaataacattgactggcaatacagcccgttgaactccatcgctgtccatcatgcgctgctgaccagcggtcttgagccgcaggatgttgaaattgtggtcaccctgccgctgaccgaattttatgatgaagatgcgcaatatcgcctcgacaatattgagcgcaagaaaaagagcctgctgcgcgacgttaaactgaataaaggcgtggtgttcaatatcactaaagttaccgtgcgcccggaatcgattccggcgggcattagcctgtgtgatgagctgaaaccgtcgcattcggtgctgattatcgaccttggcggcaccacgctggatatttcaatggtcgccgggcagatgacctcggtttcgcgcatttacggcgacccgaagctgggcgtatcgctggtgaccgacgccgttaagctggcgctggcccgggcgaataccgacacctccagctataacgtcgaccagataatcatcaaccgccacgacgaagaatacctgaccgacaacatcaacgatccggatgcggtttctgaggtgaagaaggtgatcaataacagtatcgaacgtctgaccacgcgtgtcctgacggccatcgatagctttaaaggctattcgcacgcgatcgtcattggcggcggcgcgccgctggttgccgacgccattcgtgaacggatgggtctgcgcgaggatcgtttcgtggtggctgaagagccgcagtttgccctggtgcgtggtctgaaaattattggttaaggagcgtctatgactctggatcgcagaaaagtgctgatttacctgcgcccggatatcagcgccagcgagcgcttcgcggacgcaaaaattgaggcccatcaccgtggcgaccgcggcgatatgtcgcgtaccgcgctgctggcggggctggcgttaggggaagtcgatagccgcttgccgtcgatgctggcggcgctgctggcggaagatactaaaccggaaacgctgcgtaagatgctggcctcgttccttgagatccagccggcctctcccgccccggcagccgcgccaacagccgccccggctaaggcgccggagccgcccgcgccggtgagcgagagcgtctccgcgcgtaatctcgccggttcgttaccggattaagcgctattcccggtttgcgcgacccgggaaactccccggcttgcgctgcgcttagtttgtatgccgggtatggcgtagccgccacccggcatacaggcggctccctggctggggccatgcccggcggcgctacgcttgcgcgggcctacggatccagttcaatggtgggtccagtgccatttgtaggccgggtaaggcgtagccgccacccggcgcgaagacggaacgccacgacccgggatggcacccctatccgtgggcgaggaagcgcgccaggcgctgctgcagcaggcgattttcgcgggtcagccgcgcgttctcatccagcagggtcagcgccaccgcaattcccggccagtccagctccagctcgttacgcaggcgtaccgcgcgatgcacgatcgtcaccgcgctgtcgtcgaacagccaggtgtccgcctgcggctggtgtggctcaatcatccctaagccgacgatctccgtcagctcctcttccgacaccccggtacgcaggcacaattcggtaatggtaaacgtcactgttactgtagccatcaggctttcccccatgtcttacgcggatcgaagctggcttcggcggcggccaattgttgccagagctcacgcgctttttcatctggttttggcggcatcactattttaataacggcgaacaaatcgccggtgtgggttttgctcacgagtcctttccctttgatacgcagtcgctgccctgcctgactgcccggtggcaccgtcagcagaatgctctctttcagggtgggcaccgtcactttcgcgcccagcgcggcctcccatggcgccagcggcaggacgatctccaggttatgaccgacaatatcgaatagcggatgcggggcgatgtggataaccagccacagatcgccgttcgggccgccattctcccccggcgtcccctggcctttcaggcggatacgctgaccatcgactaccccggcggggatcttcacattcagcgttttcggcgtttcgctttcgatcatgccaaacacgttgtacaccggcaggttatagctgatggtgcgcgtctgctcggccagcgtctcttcaaggaacaccgccacttcgatctccagatcgtggccgcgcgccgcgtgttgacgacgacgctgatgcgcctgctggccaaacatggaggagaagatgtcgtcgaaatcttgctgactgtagctctgctcgtgggtctgtcgctggcgaccgaagccgggatcgttgcgatgctgccagagctgatcgtattcggcgcgccgttgctcatctttcaggacttcccaggcttcggcgagatccttaaatttggcttcggcatcgttttctttactgacgtcggggtgatatttgcgcgccaggcggcggtaggcggtcttgatggttttcagatcgtcggttggttgcaccccgagaatggcataataatccttcaattccatgattttttctcatctatgctcagtgcggtggttacatattccctggaacaggcgtcagtataaagcgtagggcaaatgcgccctgacggggaagaaaagtggcggaaacttgacgccgtcggggtcgacggcgccgtggataagattagtccttcgcctgcggccgtgggcggcggcgccatccggtgaatagcaccagcagcgcgccgacggcgccagccaggcgcgcggtgccctcgccggcgctgggaaacagctggcgaatggtagggtcgctgaccagcattgacccggcaatccagccgatgagcatcccgcccagcagcaccaccgtgggaaagcgggtgagcaggaccagcaccagcttgctgccggcgacaataaccggaatgctgatcgccacgccgagggcgaccagcgcaatgtgccctttccccgcagcagctaccgccagtacgttatccagcgacataatcacatcggcaacggtgatggtgatcgcggtgcgccacaggctgccagagctgctaacctcgctctcttcttcctcattcctgaccagcttgatgccaatccacagcaggagcagcgcgccgactattttcagccacggcagcgacaggagatacaaagcgatcgccagcagcagaacgcgcgccaggatggcgcccacggtaccgatgatgatcgctttggtgcgtttctgcggcggcagtttgcggcaggccatggcgatcaccacggcattgtcgccacccagcagtaagtcgatggcgacaatctgcagcataatcactgccatgtcccattgttgaagaaatgcatacatatcgagagaaaccacctgaaaaaagagcaagaaaaaccgctgcgcagggtactccgcctgggccgcgttgaccactggcgcagacctgcgctatcgcgcgggaaagagagagcctgaaaaataaagttacgaatcaaggcgccgttgggcaaggcttcggcgaaaaagggtgatattttgtcacccagactcacctgccgttcacttatcgcaaggatccccactatgtctggccacaagaaatacctctctgtcgccctgctgagcgctgtcttactgccggcgatggcctctgccgctgacgcgccggcgactttcaccccggaacaggaggcgaaaatcggcaaaatcgccgccgactatctggtcgcccacccggaagtcctgctgcaggcgagccagaaactgcagcaaattcaggctgagcagcaggccagcgcggccactcaggcggtgctgaagaacgccgccgtgttgacccaggataaaaataccccgacctacggcccggccaacggcaaagtcacggtgatcgaattcttcgactaccagtgcgtctactgcagccgtctggcgccggtgatggagcaggtgattaaagcgcacccgcagacccgcttcgccttcaaagagtggccgattttcggcggccgctgggaaagctcgctggaggcggcaaaaaccggcctgcagatctatcaacagaaaggggcggatgcctatctggcctaccataacgggatttacgctaccggccataacgaaggcaagctgacgacggcggatatccagcagcaggcgaagaaagccggctttgatgcgaagaaggccgccgacgtcgaaccggtgctgcagagcattaacgatctggcgcaggagattggtctgagcggcacgccgggcgtgatcgtgatgccgaccaccggcgccacggaagccagcatcaccgtcttcccggggctggcagacaaagcctcgctggaagccgccatcaaaaaagccggcggctaatccccggcgtattacctgtccaggccgccgacggcggccttgctctcatgcgtcatcgctctcttcctgcggcggcggtaacgcgtggctttttaaatcaataatctgcccgatttgatcgtggtaaacggtgagcaaattatagcggctcatctccgagataatctgcggcgcgacgttaaagctgctcgccagctcatcgtcgcgcagagcgagcaccgcggtatgacgccgggtatgggcgcggcgccggttgtagtgataccagaggatcaacagccagccgttcagcgcggcaatcagcagatacaccagcgccgtattcagggagtccatcagcgattcccagcgcggagagggcggcgcgatgaactgcatcagcaaattggcgtacagaaagaacagaaaaccgagccaggccagcagcgttaagccggcgtcgaccagccggggcagcacccgatgttcggttaagatgagcgtattttcattcatcacaggcttccttttccccggtccggactcacccagcgcgcgcgggaacgttgacgtttcaccatcactttcggaaaagcgaccagcgtggtcagcaggccgatcatccagtagaccatcgggaaccagatcacccagaacagcgatttggcgacctttttctcatagcgccgctcgatatacaggctggcgacgaactgcagcaggcacatcaggccgagcagcatgccggtgaattccggtggaaacaggctatgcaccgccagattgtcaggcagcggcatcaggcggctgaggataaacagcagaatggtgatcgcgtaggcaaaggcccacagcgtggagcaggcatactccagaaacagcggccacatccggtgatgctgccagtgaaacaggcggcgcagattgaccagaaagacttcggcgccgccctgggcccagcgcagacgctgcttccataaccctttgagggtctccggcatcaggatccagcacagcgctcgcggctcgaaaaagatgtcccagtggcggagctgaagcttccagctgatatcaatatcttcagtgatcatatccgggctccagtagccgacgtccgccagcgcctggcgccggaaggcggcgattacgccggagacggtaaagacccggccatagatccgctgcgtccgtttgataagcccaatgatcgacgagaactccccaacctgaatgcggccgatcagcgtggatcgggtgcggatccgcggattgccggtgaccgccccgacgtgcggataatggatcaacggcgcgaccagccaggccgcggtatcccggtccagcagggcgtcgccatcgatgcagaccagcagatcgccgcgggcggcggcggcgcccgctttgagcgccaccgcttttccctgattggcggccagatggatcacccgcagcctcggctcttcctgcgccagctgctggagcacctgggcggtgttgtccgaagagccgtcgttaatcgcgatcacttcaaggttggcgtaacgctgggccagcgctgcgctgatggtttcccgggcgtttttctcctcgttaaagcaggggatcaggatcgagatcagtggattgcccggcagcgtcggcggcggggtatcctccccccacggccagtgacgttccagctgaaaccagaagtagagacccccggtgatccacaacactgacataaacagcggccagaaaaagacaaagtcgaggataagctcgccggtaaataccgctgcgacacctaacggcagcccgaatacgaggcataaaatgcacaatgcgataatgcgatcagtcatggtcagggtaccaccaggaagaaaattgcggcctgatacgagagatatcaggctggttgttaataaaatcgtcagggtagtagccgtagtttttgacgccgttcagccgcagcaaacgcatccagtccgccagctgctggtcgggaatggcgttttgctggcgtcgattccagtctctggcctgcagttcaaagatggttttcttcagcgcacccgggtggcgggcgacggcctgcaccagccgcgtcagccaggcctggctggcgtcgatcggcacggactccatcagcggcatcgccatggggaccgtccagtcataggcggcaaggaagtcatccagattctgcgcaaaccaggcttcgctttgcggctccaggatcggcagggcgaagagattacgcgccgttttcacctgcgggccgcggatggcctgcactgcctggcgtagatccagagtgaagcgggtcagggtttggcttttgaaacgcatccatgcctggcgctcttgcggacgttggggcactggggcggcatcgtgcgccatacccgtctgccgccaggcggcgaccgcctccgggctcacgtcttcaaaatcggtcagcacggcgtcgtcgtgaaacaggatcccgctgaagctggcgtgtcgggccagatcttcgtagatgtcggtgatctgctggcgaacccggggatcccagggcgacagacggacgtacggctggcgggcaagtaacgccttcccggtttgcggatcccagcgctgaacgcgcggcagatctgaggcaagatcgaaggccagcaccggcatccaggcataaaccttcacattgccgcgggtctgcaactgccaggagacgaagttaaacaggtcggcgcgcatcggcagccagcggttggggaaatagagcgacttgaccgtgccgtcgccctgcgggtcggagaaggcctgcagaaagacgtggctgattttcatgtcatagacgcgctgcaccagcttatcgatattctttgcctgctggacgggattggggtcatagacatagtccagatccacatgcatcacccgaacaggatcggcttcctgaatttgggtcacggcgctggcaaaggccttgagcgacgggttaccggcgatcagcaggcgtggaatattgtccagatccttcacgttgcccaggccgtcgttcagcgtaaacgccagctgatacccttgctgtttggcgatggccagggtgctgccgctggcggcgccgtagggccacacccaggcgcgcggcgttttcccggcaacctcatggattttcgccgtcactttctgcacgtcatcggtcattcgccgggtaaactgcgcgtcgctttcatagcggccggtggttttatcccagccgcggttggcggcggcaggctcgcggctgccctgcggattggccggcagaccgtagtgcgaggcccaggtgtgcgcgccgatctccaccagcggcgagcggctgagctcgcgcaccatctcccaggtagcgaagcgctcgcgcggcgtcatcaggccgccaaaattaacgggctgaccagcgggagtgtccacccagctgcccaccggcgcccatagcgccgggacgttccaggctttaagcagcggccatacgcgggtgtaaaagctgctgtaaccatcgtcaaaactgaggagaaaagccttgggcggcagcgactttaagccataatgcgcatcgagaatgtcctgaacgctaatcgcatggtagccgttatgcagcagccaggcgatctgctcattgagtgcgctggtgcgcaccgaaagataacgctggtcggcggcatcgtcttcgacgtcatggtaggccagcaccagaaagcgatccgccggccagggttgattggcctccagttgggggcgctgctgcggggcgaggaaggggacttcctcagcacgcacgctgaagataaggcacagccagatgagaagcatcaggccgttgcgcagggtcgtgttcagcatggtcatccttaaaaccgtatatttgcatcaagagtgatggcgaggttgttttcacgtttgccgtcgtaggggcgcttatcccagttcagcatcaccccggtgtcgacgacgttgttccagcgcaggcgctgcccgtaacccagcaccgtgatcgccccggcggcgtgatttttttgccagtagctgccgccgccggcgagtaactgctggctccagacggtgtcatagcgctggtaaagcgtgtgatcgacggccagcgccgcggtggcggcgaggtcccgtgccggactgtagtaggcggtgtcggtgcggctattggcgctggccgacagaccgggctgcaaatccagcgttaaccatggggtttgccagaggcgttctttaccggagagggtgtactcatggcggcggttgcgatcggtaaaccggctggcggccgcgctgacgctgtactcccggcgttcgtttggagaccagcgcagccagccttcgccgcggttggcgctgacgccgttgcgtaacgcgcgcagcggcgtctgctgcgaaatccgctccagttcgccgcccagctgccagcgatcgctaacgtcatgggcggcggaaaggcggacgccgggcttgttctcgccgtgaaaattgacgctggagagctcaagctcgccccagtagtcgcgcggacgccattcaataccggcaaacagctggcgacggctgcctttcccctcttcaaaattgccttcagcgaagcggtgcccgccgaacaaccgccagctgtcggctagcggcgggctgtagatcgccgtctcaaaactgaggtcgtgcgtgccgctcaccgggttgtcggaatgcagccctttgccaacgctcaggcgcagctcggagagataatggatctcgcgcgctctggccaggcgctgggtgttcagatcccgtggcgagcgggcgacgacgtcgtcagccagcagatccatttgccgccactcctgcagatcgagggcgacccaggcctgctggcgctccagctgcaggctggcgggttccagagattccgccgcttttagctggcgttcggctgcccgtggcaatcctctctcctgcagaagggcggcatagtctatctgcaggccctggtttccaggggccgtcgccgccaggcgctgcattcgggcttcggcctgcggcaggtcgttggtagccgctaaatagtgcacgttaagcgactgtgcggtgagccagtcgtcgttcggctgcggcgttggcgagccgtagagacgacggatgtagggcgcattcctggtgaggcgggcgacataccgttgcgcctccgggtactgaccggtgtccagcagagcgtagaaaagctcgtgttcctcattctgttggcttgtcagccacgaaggatgctggtggataagcgtcagcgcaggctcaatttgcttaagggcgataaaagaggagatgacccagccgatggcccagtcgggaacggtctgctgctgggcgatcaggctttggtattcgcggatgacctgcgcgtactcggcgctggcgtacagtgcgcccagacgatcaatacgcgcccggatgatgtcgggcgcagcctgtgggtcggggtgccaggcggcgatcatcgcgtcatactgcgtgagcgccgtgcgggccagcgcgtaacgcgccttttcttcgcgggaaggggtatcggcaaggcgcaccagttcggcggcggcgttcagctgcaagttacgcttttccgcaggcgtcagttcgacgctattcgccaggccgagagcaggggaatcaatccggttgcgggtcagggtcgccatcaggctggccagcgcggttttgttttgcggttcacgatcgaggatctgcgtgtccaccaacagctggtcccagcttttgcccagccgcaggtagacataggagagcgtctgcaggtgcgcaacgctcgcctgctccgccaccaggcgacgcgcttcgctgagcgcctcgccgtccttgcgggcatcggcgagcgttttgatatagccgatacgatagtcgtcgctgccaggggcctggctgagtgcctgctgccagagggtgagcgaggtttgccactgcttctggttgcgcagggcctgcgccgcggcggcggtgccccgtgcgggaatcggcatatagacctggtagcgtcgccagactttcaccacttcatcgtcctgaccggcccagagggccacctgcagccagtccgccacctgagaaggggttaaggcatgccgcagctggtacttctgaaggtaactgagaaagggggcgtactggccttggcgcgcttgcaagatttgctggtcatagagcgaatccgctccctgaaccagcgccgggaagagcaaaagcaagccgattgatagcgagagtttcgtgttgcgattaaacaataacgtatttgaataaggtgatctttccatttctatttgccatatgttcatcaagaatccattgcacaacacgaccgtcctttgacggtgagttaaaggatgaggatggtcccatttagctgactggcactgcaggtgaatgacctattgcaaactaataaacatatctcctgttgataaatgaatgggtaatttatacccgatacggcaaccgataaatatggataaattatggtctgcgttttaagataattctgtaaaatcgacttcattcgaacggaagtgttcaagttgatttctttaacctactgatataaataaaaaagaaagtcaggtggaattttgtttcaaaatggcggtgtgacttatatttagttggtgttagagttttttaggcaatatttaagatgatttctgacaaaaattctcaatagcaaaaaaagcatcttttctgtggattttttttatttataatcaatctgtttatttcctgtcagaacgcaaggagggttttcacagccagattcagatgccgcgctaatgataaatcacaggtctcgttattttcaccgccatgcgaagcgttccatagggggaggtaaaacgtctggttgacgagaatttgttgattaaatgttaaagggacgatttgtggcaactttaatgatattggttacccaggattactatctttttcaaggtgttaagaatttttttcctgatatcattcagttagattctagcggaaaagcgattttagataatgaggttgatgaagtctctctgctggttgatagccgctcgccgctttgccattacgattatctcgtgctggcagcggcgaaatccagaaaacgaatatgttgtatcgtcctcgatatgcgccatcgggaagagcatttactgagcctgaaatcgtttttaaacatgtcattatcacccgcggatatggcgacattatttggcctttttctggagatgaatagcaagcgtctgaccaaagagtggtttgacgatctgcgcttaagtttgtctgaacagttaatgttacgtttactcatggcggggatgaccatggaggaggtggccgtcaatctcaatacgtcactaaaaagcctttaccgcaagcgtactgcgctttatgagcggttggggttagataattttaatgaagcttgcttatttatctttcgaaataagctgctggagcagaccgaacgttcgttatgaagcttcgctgtacagagaatggatgttatcgcaaggtatttgttgacgaaaatctaataaattaaatagatattgataggtacaaccgtcgatacccggcggtatcgatgatggcattcggcatataattccggagctctttggaagtatttaccgccaatgcggtttgctatgcacagcgattattataatgaatatattccttgcgccgcacaggaatagttttgtcataaattaacactaccatggtattccgactcacgcgtcggaataccatgagatatcgtgaaagcatcagaggagcgaggtggatgagaataagggacagtattgctgagcggttagaggcatgcgggctctaccgtcgggcggcatccagatggattgaggtgatgcagcgttgtctggacgatgaggaccgagagtggatccgtcaccatcgcaatcagtgtctgaaaaaggcgcaacgtccgccggcgccgaaagaggagtttgccgacctccaccaggcggcgaaagagactcaatatcgtatgggcattgcgaagccctatggcgaagcattcagactgcccggcaaagggaaaacggccgccgagtaatgcctttcttcacgacgtttgcctgacggcttcgccttatccggcctacgggtcctccacaggttcaaacagcgtaggcccgcgcaagcgcagcgccgccgggcgatacacatcagacaccgtacccgcggttgtgccggatggcggcataaatgccttatcctgtttacaaatggcattgggtccacccatgacattcgtccgtaggtccgcgcaagagcatggggtcagttcattgctgagcggttttttcgttttcaaagcaagagaatacccatgaaaaaaggatctcaagaagatccttgtgatgtcacgttcagccgttaacaattacgttaatacgactcatatttaagcccgtaattcctactccacctaacgtcaaaaaggggctttctatcaatacaccgatcctctgtcgggatgtcgttaaaacaaaaaacctcatcggtagaaaacagtaggttttcatccggttccgtgcgatatccatccccaaaatcaacaatccatacatggtaaaagccgtctttaccctcgtgtggaatcccgtacttcgcctgtattacggccttattggcttcccaccaggctatctgacgacttttcaggtatggaaaatgcctgaccagaatcgtatttccatcgtgaactgccacaatctcaaccggggacagatactgccatagtagataaccacctaccgcagccgctacaacccccgctatcagtcgcttattcaccccgcctcccgctgatttccacggtcgcattcatctcggtgatgaacggcctatagccgtatttcacatagcgctgcagcacaaaccagatccggaaaattcggccctgatgaaaaacagggttcaggatatccgcgtcatcaagcccgaagtggtcctgtacccggtagtgtactttcgcccggtagctgtcgcccgtcacctccagtgactcgagcgtgatatgcgtcgaccacgtatcatggacggtaatcaccagcccgttagtcttatcgatctgacgatcaaatttaggtagaacagctttattaacttccttaaagttgccctttccgtcgaataaatcgtcctttttaccgagaggaagaaatccatattcgtagctaacagcatcatccaaggcccttttaatccccaacaacgagctatcactcgaatggtcattcaggatctgctctttcagcgccctgtccagtaatgggctgctgtacggtgtgccgatgttcccctgcatatgattaatcatttcggtgatgatgtttttatatgggccatggaaggagaataccttggcaagtccccggaactcatcaaacatcagccggacactttcctcccggctgaccacgaccggcgtacttcccgtcaggctgcccggataaaatacaccatacgaactggcgggcactggtgggacaagggtcagcgtatacgggttcactttcgccgagacatccgtcagaccaaagcgctctttcagtgcttcctcgctcagatcaccgtggtgcatgtcctttgcgccgtagtcatccattgccctctgcgtggcataaatcagcgccggaaggggcattggctgaggccctttagccttcgcctcattcagttttttcctgctggcttccctctcccgttcggcagccagcccggcattgcagttatattcgtaggtgttatccaaatcttgcggaatgaatttcgcccgacacgggcaggagctgtaactttcgatggagcctgctagctggcggtttacaccgcctacttcgtacatgtcgcccatgccaccacaaatacggtagatccccggatgttttccgcaggtcactttatcgctttcccgcgcctgtgatcgcccgaaaaattcggtgtcttcagcaccggtgataattttaccgccacagacggtacgatctccctggaaaagaaaatagccttccagcgccatcagtgcttatctcccggcacagttaaaaagccatccggcagtgcatcgccctcacggaatacaaacatctgacacccctgaggtgttgaaatgatttcatcaccgttatccagcatgctgcccacgagcgccatcgattccccctgcatcacccgacctttaccggctccgcaaataatggtcgcctcacgtccatccggatacacaactttatctccgacccgcgcagaataatgcccgtcaagggtacttttgccggatgtctcacggatcacgccaccatgacgggtcaggctgccaatcgttgcaccccggaaaatatggagaacagggcgctgtaacattgattccatttctgcgacgagtgactgacgcgactgtggctcaagttctgacagaaactcatcggtaaatggcggctgacgcagccgttccagtacatcagtggtcagttcattggtgtattgctgtgacatggtaaatccttttagtgtatctggttgctcattccgctctgagcgatcatggattagaattgaagttcgatcagtgtttcgcatctgttcgatcaatcgggatgcgttaactttttatagtgcttttaacctgtttttccctcgctttccactaccagcgagcttttcctcatcgacttaccctgcagaaccaccctgcgcgcgttttatacagcagcctgtccaggattacgtctgccgttgtcaggatctccatcagtccatgctgtccactgggaactgattcactacgatggtactgctttggccgtaatggtcttaagtgatctccagcaggcgtttcttcgtcctccaggcccgtgcaagcgcagcgccgccgggcgatacacattagacgccgtacccgcggttgtgccggatggcggcataaatgccttatccggcctacgggccctccagcaggcgtttcttcgtcctccaggcccgcgcaagcgcaacgatgccgggcgatacacatcagacaccgtacccgcggttgtgccggatggcggcataaatgccttatccggcctacgggtcccccacaggttaaacagcgtaggcccgcgcaagcgtagcgccgccgggcgatacacatcagacgccgtacctgcggttgtgccggatggcggcataaatgccttatccggcctacgagtcctctgctggttcaaacagcgtaggcccgcgcaagcgcagcgccgccgggcgatacacatcagacaccgtactcgcggttgtgccggatggcggcataaatgccttatccggcctgcgggtcctctgctgattcaaacagcgtaggtccgcgcaagcgcagcgccgccgggcgatacacatcagacgccgtacccgcggttgtgccggatggcggcataaatgccttatccggcctacgggccccccgcgggttcaaacagcgtaggcccgcgcaagcgcagcgatgccgggcgatacacatcagacggcgtacccgtggttgtgccggatggcggcataaatgccttatccggcctacgagtcctctgctggttcaaacagcgtaggcccgcgcaagcgcagcgccgccgggcagcgggtgatagaacggagttcgatgaagagtccggatgcagaaaagcaaaaacccgccttttgggcgggttctttaaatagtggtgcccggactcggaatcgaaccaaggacacggggattttcaatcccctgctctaccgactgagctatccgggcaacggggcgcattaaaccgtaatccgcccaccccgtcaaccaaatttcttaaattacttatcgattgcttatctttgcggcaattctgcgttcaaaggcgcgttttggcttaacttcactgcatgccgttatcgccctcgcggcttttccagccgctggtaatggcgataacgtggcgtagtccggagatgagataatcgccaatgacctcctcgtcctcacgcggcgagctcagggtaatttccgcatccacgccgtggcgataggcgccatgatggctgaaaatggtgccgatataacacttcccgttcagccagaccggaatataggccaccgtctcatagatatagttaacggcgacgccgctgtagtagttatccgcctcgtcagcggaggtgcccggcgggatggggcagatcggcgcgtcgttgtcgctggcgggtctgtctttcagcaggctgccctgcattacctccagcgagcgcagcaggtccgctttatcgccgtcgctcaggctgggggtcagcggctggtctttctccggggagcggatgctgttcagcgtatagcgatagcgaaccgtcaccgcgggcgtctggctggtggtgctgaacgggcgtagcaggtagaggttatcttcgccaaactggccgttgtaccacagggcatacacctggccgttgattttgacccagtggttccactggttagccccgcggccattaatggaaaagagggcgccgggcaccccggcatcgaaatcatcaccattatcactgtcgctgccgttgacggcggcaaaatcatcatcacctcgcttgagcaccccggtgtagctgaagagcccggtgccgcccacgtagctgtcgatgatcaggtcgcgtttgccgtcgccgtcgaggtcgataagggtaaagctgactttgccgttttctgaatccgcgctaatcgaggagcgcagaaacgcctgccactcatcatcgctgatatccggggacggtttactggtcgtgatcagcgtatcgtcggcgtaagtgagcgtgaagtcggtaatatggccggttaacggaaactgctcggcgatcttattcagcgacaattctggatcgcttttttgcgctttcaacactgtgttatacaacgtgcgcagagccaggttatccgcctctttctgctgcctggggatcacctggctgacaaaggtcggcagcatccaggtgccacccggggtgatttcccgacacataccggtgctgtacttcaggctgggggtaaaggttttaccatcccaaacgcgcgtctcgccggtgacgcagtcggccatgccccgttctttgtgcaaaaagacgatagcgccgtcggcgtagctggaggcctcggtagtgagcagccgcggtttgctcaactgggcgttatcgaccagccacagagcgtaaccgtcgttatagggcgctcgccagcagagcgcctgcgccagagaatgggttttatccagcgcggtcagcgtgatctggcgatctgccgccggaatggcctgattctgccagtcgtcgcagcgctggttcagcagcggcgtcaggatgggcagcagtttctggcgctgaagcatactcaacggcactggctgcgcgttatggagaaccggggcggcgataatttccggggcgggagtggctggcaaaatggcatcgtcgccggcatcgcctttatccagcagcgcatcggcggtgccggtgcgtcgctgaaacgcatccattttacccagcacctcgcggctgccggcgctggaaagcggcaggtgctggccgttaagggtgaattcgattttgcgctgattcgttaacgcctgtagcagggcggtggtctgatcgctgtcgaggcgaaagtggctgtcgtcgagagcgtccagcgcgccaaaatcccggtcgtcgatcagcaggctggcggtggagtcggcggggatatcgtgctcgatttgcgcaaaggttaccgtggcggtgaggtgctgttcgctgcccgcgttgcgggtcaacagcacgctgacctcacccatgcggacgccgtaacccgccgcccggcaggcgccggtattatcgcaggcgagctcccagtctttttgtgcaaaggaaaaaccttgcaggggagccgccagcaggggcgtagagcagaggcccagccaggcagcccagaagaacgcgcgcatatcaatccctgtcagcaatcagtgagggggaaattataggcgcgacgtggcggttaggatatcagaatcaggtcaaggcgccgcccatacggcactgggcgaagcgtagaatatcttcagccagccgccgggcggtatccacatccgtctggctacgtttgaccagcagacggctcagacagccctcgacaatcagctccatctgcttggcgaccatttccgggtcatccacctccagctgagtcagcagctcgtgagtgtaggccagcgaagcctgcttctgctgttccgccagctggtgaatggggtgctgaggatccgggtagaaggtgcaggcggcgataaacaggcagcccgggtaccgctggttgcttacgcaggtggtgagtgcggcatagcgtgccagcagcttttgctctgcgcttaaggtctcgtccagcaggagctgacgacgccaggcatccacctgctggctcagatagcgaagcgcgtcgtacagcagcgcttcgcggtcaggccagaagcgtttcaggtcgctcgtcgggcaggacacgcgctcagcgaccatctccagcgacgtgttggcgataccttcaatttcaagaatcttaatggcttctgccaggacgtcttcacgtagcacggtgttctcctccatctttcctcctaaagtgtcgctcacgcttgccaatcgcgcaaatgggcgctgaatgccgcggcatccataaagccggtgactcgccgctcaggctgttcctgaccctcagcgttgaagaacaggatcgtcggcagacccagcacctgcaggtgtttcagcagcgcgacgtcttgcgggctgttcttcgtcacatcaacctgtaataacacggtgcctttcagcgcctgctgcacgtcaggtgaactaaaggtgtatttttcaaactctttgcaggccacgcaccagtcggcgtaaagatcgagcatcaccggttgacctttcgcctgcgccagcgcctggtcaagctcggccaccgagctgacgcgggtgaaagccaggtgcgcctgctgctcgaccgccggggcgccaaacgcccagtcctgcagaggccgcgcgctgaccagcgcggcggcaagcagaatgatctgtaccagccgcatccacggccgggtagcgcccagcgaggtgataaacgcccagctgaagaaggcgacaccgagcattgaccacagccgtaacccccactggtcgccgaatatgcgttccagcaggaagacgggcagggcaaggatcacaaacccgaaggcggttttcacatggctcatccacgggccgcttttcggcagcaggcgattgccaaacacggtcacaaggatcaacggcagacccatgcccagcgcgtaaaggtacagcgtgccgccgcccagccacagattaccgctctgggcgatatacaacagaatggcgcttagcggcgcggtggtgcagggggagcagatcagcccggcaatagcgcccatcgcaaagaccccgccgggcgagccgccctggcgcttattgctgagcagcgtcagccgggtctgcagcgacgacggcagctgcagcgtgaacaggccgaacatggagagcgccagcagtataaacaccgccgacaggccgaccaggacatatgggtgctgcagggctgcctggaactgcagcccggcggcggctaccaccaaccccagcgcggtataggtcagggccatcccctggacgtaaataaaggccagcagcagggcgcgcacggtggaaagccgctgttttccgcccagcacgatgcccgaaatcagcgggtacatcggcagcacgcagggggtgaaggcgataccaatgccaatcagcagcgcccacagggcggtgaagggcagacgagcggggacgtctgctggcggcgccatggcaggcgcctgcggcacggcgttctcctccatcgggcgcggttcaactggcagcggcggattgaaggccgggcgatggttcagcgacgacacgggcgcggcggcggttggctgagcgtcgtttgaggccgcccgcacggcgctcagcgggatcactttagtctccggcggataacagaatccggcatcggcgcagccctgccaggtgacggtgagagtagcctctttgtccgcctccttcaccgtcaccggcacggtcaggcgttggcgaaagatctcgcttttgccgtaaaactcatcttcatgccactctcccgccggcagcgccggttcgtcgatcgtcgccccggcggcgctgaaggtaaactgttgacgataaagataataaccatccttgatttgccagctcaggttgacgtcatgctgttgctgctgaaagtcaaaggcgaaagcttgatcagcaggcacgaagttcgagcgccccggcgcgtcgaataacccggcggtggctgatgtgctgcacagcagcaggatcagcgtaatgatgcggtaagccatgagaggtaatcgttgtctccatgcgtgacgggtagaaccagcagttctggggtttgatacgggtggtgtgacttcaggcaatccagcagcgcctgctgatgggcaaggtcagttttgagtagcatctgcacttcatactcctgctcgagtttcccttcccagtaatacagagaggtggctcccggcagcagcgtagcgcaggctgccaccttttccgccagcgcttttgccgccagatcctgggcggtcgcttcgtccggcgcggtacagagcacaacaacagcatcaggcgtagtcatcatgaacctcgtatcagcgaaaagaggcactataacacgcaagatgcggggatattagcgtaacgagcggggaaagtgagggcaacggaaggcgggcccgtagtgggcccgccgccagcggtatttacagcataatcccaccaaagataaagccaaggatcacgcacagcgtgatagcgataacgccggggatcaggaaggcgtggttaaagacatatttaccaatgcgggttgagccggtgtcgtccatctctaccgccgccagcagggttgggtaggtcggtagaacgaacagcgccgagaccgcggcaaacgaggcgatagccgtcagcgggctaacgcccagcagcagcgcggcaggcatcaacgccttggtggtggctgcctgcgagtagagcagcgtggcggcgaaaaacagtaccaccgccagcagccatgggtaattatgcagcagatcgccggccacggcctggatgtcgctgatatgcgctttaacgaaggtatctcccagccaggcgacgccgaggacgcagacgcaggcgctcatcccggacttaaaggtgctggcgttgagcacttcgccggtgtcgattttacaggtgatgctaatcagggtggcgatggtcagcataaataccacgatcgcctcgttacgcggcagcaccgggttcttaatcaggccgacggtatcgctgatggccgtggcgtagaacattaccgccacgatgccgatcaaaaacagcagaacggaacgtttggcgtgcggctgcagctcaaatacctggctgccgcgcagtctgacttcccccttggccagccgctcctggtaaaccggatcgtctttcagttcgcagccgaggaagttgcagacgatagcggtgagcatcaccgccagcagcgtgaccggaatacagatggccagcagcgtcaaatagctaacgcccagcggttcaaggataccagcgaaaaagaccactgcggcggaaatgggcgaggcggtgatcgctatctgggaggccaccaccgcaatcgacagtggacgagacggacgaatgccttgctctttggcaacttcggtgatcaccggcagcgtggagaaggcggtatggccggtgccagcgagcacggtcataaaccaggtcaccagcggggcaaggaaggtaatgtacttcgggtggcggcgcagcatccgttcggcgaggctgaccaggtaatccatcccgccggcgacctgcatggcggcgatagcggcaatcaccgccataatgatttcaataacgtcgaaggggatcgcacccggtttaatttgaaaaataagcgtcaggacaaggacgccaaggccaccggcaaagccgataccgatgccgccgagccgggcaccgagataaatcgccagcaggacaataaccagttctgcaccaaacatatatgccttccttgttttttaacaagttgatattgaattgttgtattttagtaaaaccaaaaagcaaaaaaggcatgtcatcgctgacatgcctttgaatgactaacctgaaagattactgttcgctttcatcggtataacgctttgctttataagcgggatgcatcaggttttgcgcagagaagatatcatccaactccgccgccgtcagcagtccgcgctccagcaccacttcccgtacgctcttgccggtttcggcacagatcttgccgacgatatcgccattgtggtggccgataaacgggttgaggtaggtgacgatgccgatggagttatacacgtagccttcacataccgctttattggcggtgatgccgttaacgcatttctccagcaggttgtagcaggcgttggtcaggatatgaatcgactcgaacatcgcctggccgatcaccggctccatcacgttcaactgcagctgaccggcttcggaggccatggtcacagtggtatcgttgccgataactttgaagcagacctggttgaccacctccggcaccaccgggttaaccttcgccggcatgattgaagagccagcctgcagctcaggcaggttgatttcgttgaggcccgcgcgcggaccggaagagagcaggcgcaggtcgttacagatcttggacagtttcaccgccaggcgtttcagcgaactgtgaaccataacgtacgccccgcagtccgaagtggcttcaatcagatcttccgccgggacgaccggtaagttgcttacttcagccagcttctgcaccgccagctgttgatagccgtccggggtgttgaggcgagtaccaatggcggtggcgccgaggttcacctccagcagcagctccgcagtgcgcagaatgcttttggtctcttcattaagcagcacattgaaggcatggaactcctggccgagggtcatcggcaccgcgtcctgcagctgggtgcggcccattttgaggatgtcctggaactccacggctttcgcctggaagccttcgcccagctgtttaatcgcatcgattaacttaaggatggaggcatacaccgcaatgcggaacccggtggggtaagcatcgttggtggactggcatttgttgacatgatcgtttgggttcaggtactggtattcgcctttctggtggcccatcagctcaaggccaatgttcgccaggacttcgttggtgttcatgtttacggaggtaccggccccgccctggaagacatcgaccgggaactggtccatgcatttgccgttattcaggacttcgtcacaggcggcaataatcgcatttgccgcgcttttgggaatggtctgcagctccttgttcgccagcgcggcggctttcttaaccatgaccatgccgcgcacgaattctggtatgtcgctgattttgctgttgctaatgtagaagttttcaatcgctcgcagagtatgaacgccgtagtaagcgtccgcgggaacttccctggtgcccaacagatcttcttcgatacgaatgttgtttaacatgtgaaccttcttttcaagctgccaatgaattcaccaaacacacagaatatccagtattcagtatattttctggccgacgattatttccttaaccggcccggtgcccaagatcatatgctgatgatagcgaatatcagtaagcttgatcacttattacattgcgggtatgagaagatttattaatctgtgaaatgggtcaccgctttcttattcctgagaaaaataagcctttccgctgattgaaaagccgctcagcatccccatgttagtgggatgcgatcagcaaattgatgattacgggcgctgaacgcagcgcccgttgatgaaggagacgccggtgcgttggattccgtttattgctttttttctttacgtttacattgagatatcgatctttatccaggttgcgcacgtgctgggcgtctttatgaccctgatcctggtgatctttagctcggtggtagggatgtcgctggtgcgtaaccagggcttcaaaaacttcctgctgatgcagcagaagatggccgcaggcgagagcccggcggcggagatgatcaagagcgtatcgctgattatcgctggtctgctgctgttgctcccggggttctttaccgacttcctcggcctgctgctattgctgccgccggtgcaaaagcatttgacgatgaagctgatgccgcacctgcgcttcagccggatgccgggcggcggctttagcgccggaactggcggcggagagaccttcgaaggggaattccagcgcaaagatgagcagcgcgaccgtctggaccataaggacgatcgccgcgattaacattcccccggcccggtcagcagatgcgaccgggccgctttctttgcaggcctacacgcttcccgtcgccagcttgcgcctgggtaaaaacagccacagccccgccagcatcaccagcgcgtacaggcttttccagccgaccatcgccagcagcagcagacagagaatgctgcccaccaccgccaatagccgatagcgaccgcgaagcaaacgacaacccgccagcatgcacagcagatagatcatgatgaaaatgccattggcgtaaacgatcagcgcgtccagattgatatcgagcagatagatgccaagggtgctaactacgcaggatcccagcacggcgttgagggcgttgcgcgggatctgccgtggcgacagccttgcgaggtagctgtgtggcttatgctgcgcttgcgaccagaccaggcgggcaaagctttgaatatagatgttgaggctggcgaaacaggcgagatagccgatgacgcaggctacccacagcgcttcgacgccgaacagacggaccacgatattcggtaatgacgccgccgccgccatctcctcgccaaaggcgtggaagtgcagcaccagcacggtgcaggcccagtagaccgagccggcaagcagcaggcctatcatcagcgccctggggaaatcacgctcgggatgtttaaactccgaggcgagatgcgcgaaggcttccagaccgacaaagcaccagaacatcaccgacagcgccgaaaagagctgcccgcggtcaatctccgccggggccgggaaggggatctgcgccgggcttatcccgccgcgccaccagactacgacgatcagcgccacaatcagtacggcaaccaacgtctgcaggttggcgctggagctggcgccacgcgaaccgacccaccagacgatggccagggtgcccagctccgccagcagcagctgcgcatcatgccagccgaacagcgcctggccaaaaccggtggcgatgtgcagggcggcggggagtccgaccgggataaccgataaaaacagccagccggtgacgctggccagacgtggcccaaaggccatatcgacaaagtgggccacgccgcccgcgctgggaaaatggcggccgagcagggcgaagacgatggcaatcgggaaaacaaggagaatgagcagcggccatgcccacaggctgttatcgccagcgaccagcgccgccagcgccgggacggcgaagacgccggtacccagcaatgaggtggaaagcaacccaactccctgtcccagccctaactcctgttttaaaccactcatgattcaatcctgcgccagtgaaaaaaaagagagtatcacaatcgcttttccttatgaccgattgcctgacatggccgctttttgtgcgccagcgcaaaggtaaaaattttttttaattttgcccttgaagccgtaaatggccatccccatctctctctgcactagccggtaaaccgcgttcggcccggcgtcacccataactgataatgactttctcgaaggagagctatcaatgagtattcgtccgttacatgatcgtgtgatcgtcaaacgtaaagaagttgaaaccaaatctgcgggcggcatcgttctgaccggttctgcagcagctaagtcaactcgtggcgaaatcatcgctgtcggtaaaggccgcatcctggaaaacgggaccgtgcagccgctggacgttaaagttggtgacatcgtgattttcaacgatggctacggcgtgaagactgaaaagatcgacaacgaagaagtactgatcatgtccgaaagcgacatcctggcaattgttgaagcttaattcgcacgaccctgaacgaatttgaggaataaaagaaatggcagcaaaagacgtaaaattcggtaacgacgctcgtgtaaaaatgctgcgcggcgtaaacgtactggcagatgcagttaaagtgaccctgggcccgaaaggccgtaacgtggttctggacaaatccttcggcgcgccgaccatcaccaaagatggtgtttccgttgcacgtgaaatcgaactggaagacaagttcgaaaacatgggcgcgcagatggtgaaagaagttgcctctaaagcgaacgacgcagcaggcgacggtaccaccaccgcaaccgtactcgctcaggctatcgtgaacgaaggcctgaaagctgttgcagcaggcatgaacccgatggatctgaaacgcggtatcgacaaagcggtactggctgcagtagaagagctgaaagcgctgtccgttccgtgctctgactccaaagctatcgctcaggtaggtaccatctccgctaactccgacgaaaccgtcggtaaactgatcgcggaagcgatggataaagttggtaaagaaggcgtgatcaccgttgaagacggtaccggtctggaagacgaactggacgtagttgaaggtatgcagttcgaccgcggctacctgtctccgtacttcatcaacaagccggacaccggtgccgttgagctggaaagcccgttcatcctgctggctgacaaaaaaatctccaacatccgcgaaatgctgccggttctggaagccgtagcgaaagctggcaaaccgctggtcatcatcgctgaagacgttgaaggcgaagcgctggcgaccctggtggttaacaccatgcgcggcatcgttaaagtggctgcggtgaaagcaccgggcttcggcgaccgtcgtaaagctatgctgcaggacatcgctactctgactggcggtaccgttatctctgaagagatcggtatggagctggaaaaagcgactctggaagacctgggccaggcgaaacgcgtggttatcaacaaagacaccaccaccatcatcgatggcgttggcgaagaatccgcaatccagggccgcgtagctcagatccgtaagcagatcgaagaagcgacctccgactacgatcgtgaaaaactgcaggaacgtgtcgctaaactggctggcggcgtggcagtaatcaaagtcggtgcggctaccgaagttgaaatgaaagagaaaaaagcacgcgtcgacgacgccctgcacgcaacccgtgctgcggttgaagaaggcgtggtggctggcggcggcgtagcgctggttcgcgttgcggcgaaactcgctggcctgaccggtcagaacgaagatcagaacgtcggtatcaaagttgcgctgcgcgcaatggaagcgccgctgcgtcagatcgtttccaacgccggtgaagagccgtctgttgtggcaaacaacgtgaaagcaggcgacggtaactacggttacaacgcagcaactgaagaatacggcaacatgatcgacttcggtatcctggacccaaccaaagtcacccgttctgcactgcagtacgcggcttccgtggctggcctgatgatcaccaccgagtgcatggtgaccgacctgccgaaaggcgacgcgcctgacttaggtgctgctggcggcatgggcggcatgggcggtatgggcggcatgatgtaatcgtgcgctctacggcataaaaaagcagaaacccctggccagcaatggctgggggtttttcttttggcgcgctttttagtataaggcttatacataaaaatcatttaagctgcatcagagcggcaagcacctccgtttcggtagcgacctggtaagcgcagccggggagggaatgaacgcggctcatgccggcgcagtttgaaggatgacagatttacatccgggccagtgcgtccagctcatcgatcatggggaataacatgcaggtaaaatatttagcagggattgtcggcgcagccttactgttggcaggttgcagttccagcaatgaattaacctctgccggccagaatgtgcgtttcgtgcaggagaagccgggcgcagaatgtcagctgttagggaccgcgacgggtaaacagagcaactggctctccggccagaatggcgatgagggcggttccatgcgcggtgcggcgaacgccttgcgtaaccaggcagcagcaatgggtggcaacgtgatttacggcgtcagcagcccgacacaaaacctgttgtcgagctttgtacctaccgacagcgaaatgaacggccaggtttataagtgcccgaactgatgcgtgacgcctctctctgcgagcgcagagagaggcgtggtcgttagatgaggatcaggcgttaagctccgctttcttctccagatagaaggcgtgcagaggacgcaggcactcttccagactgagcattcttcccggctgggaagggatgacagtactgaagatctggcatggcgccagctccgcgtgcatcgccttgagcttggggcttttctcgataatccgcgtcacaacgttattttccagttctgataaatgcggcgcgctggttttgaccaccgctccggagacaattttcttgccttcgtctgtctcgcagcagtacagcacgcccagataatgggaaaacaggtttagcttccagtcttcctggggatactgctggtaatcgatattgggctgagtggttaagtcgacggtatagcacattaaaaaatccatatttgaacttaaatactgaaccagttcctggtcgccgactgtttttaatgcttgttgaataccgataattaatgcttcgatttgcagatcgtcaatacataaagtactaatttgttcatcctgaaatacaagaattaacgttgactgtgtttcgccaggtttgagcgtaatggacatgattcgccgctcaggggatggttgctgtatttcagccgtctcaacctgaggaatattggcaacaagtgcctcattatacgtgataagctcatctttataggcctctccctggttttcaagccgctggaaaatcacagccattctgctctgcagtatcaggagcagatcagctagcaccggtgcctgaagatagtaaatctcgcaaaagccattttccttcttaactttcagcagcaacgctaaaaatcgctcttcaaaggtaattcctgcggtattaaaacctataaacgttccttgcatattcttctcctttattaagctgtagtcaccgacttcgattgtgagagatcgataacacgatcggcggatgcaatggtcgatggtcgatgcgcgacgataatgcgggtgatacttagcgctgaaatagactgattgataaccgactcatttctgaggtcaagatggctggtagcctcatccatgaataaaatactcggtttgcgatacagtgcgcgggcgatcaggatacgctgcttttgcccacctgaaatacccagcccaagttcgccgacaatggtttcgtatcccatagccatcttcataatttcatcatgaatgttgcaccgtctggcacactccatcacaaaatcaagatcggcgctatcatcgaagccacttatattatcaataagggagccggaaaagagacggtcttcctggagtacgcaggcgataccaagacgatagttattcaaaccaatctttttaatctccagattatccgccagtatttcgccggaatccggcgagagcagtccgcacataacttttaatagtgtggttttccctacgccagatgggccaattaacgcaactgattctccaggagcaacggttatgttcaaatttgtaaagatgggttgtgaaaaaggatcgtattgataactaagatttctcacttcaagttttacgccagtgttttccgtaaaaacacgccgcgatggaagttctttttctggttcactaaatgctatttctgatagacgttcgttgtgcagtgagagcatacgaagctgcatcaccaaatcaatgagattcgatgcacgttgagaaaactgaccccgataggcgttaaatgccataaacataccgagcgtcatctcattatcaattaccataatggcacccaaccacagtaccactacctgatcgattgaggtgataaaggtattaatgccaccaaacatcatatcgaatcgagtttgctttatacctgcattgctggcgtcaacgttaagattcagccaatgctgtgagcgacgttcttttaaattcagtgctttgatcgtagaaatgccataaagtgactccataaagtgggagttagcacgtgcgcctttgacgacctgttcttccgttacgcgacgataaaagctataggtagcaaagcgcataatcgcatagcaaatggtaaagccgatgacgacccagactaaccaaccaccatataaggtcagcatcaccaataaaccgattgtcattatcgagtcgatgatgccggtaacgatactattggtaaatattgagcgaatcgtatccaaagacgagaagcgagactgaatatcacctaaatgccttttctcaaaaaaggataatggcaaacttgtcagatgatcgaataacgtcgttttccattgaatatttgtcagggtatttaacgttaacgacgtccatgcacgtagcatgctaataaacgtgcggaatagggtaaaaaatatcaacccgatacagataacagacagtaagctttggtcgtgagccataatcacatggtcagtgactagctgtgtaccaatcggtaacaggagtccgatagcttctaccactacagagtaagcaaagatcttaatcagtgctgattttaaaccaacaattttatgcattaaatccagcaatcgtaatcgggattttgcttcttcttgctggaagttatgatcgggccaaagttcaagcgctacaccggtaaaattgtttgacatctcattgatgccaatgattcttttacccaacgccggatcgtgaataacaaatgcgtttttccttacctttgtaagaacaacgtagtggttcatcccccagtggatgatgcaggggagtttaagctgctttatttcatcaaggtcaagagctaacgcccggctttttaagccggcatgctctgcagttttgcttagagacattagtgaggagccctgggaggggctaccaaaccgctgacggaaattaaacagatcgatattcaacccataaaaaccacagaccattgccagacaggcaattccacattctgatgattctgactgaagaataacgggcgttttgttaacaagagaaaaatttaactttgcaacaacagttttgaaaagttcgttagtcatggatcggcccagtaatgctttgagttatcttatacacaggggtaaacatccacatatagagcggacgctcttccaggaatacaacagcttgagccttgaggccatttgaaagcgaaagcgttttaccattatattcaaaggttttgttttcaattttcacaatggtcttatagagcgccagttcctgctggtttgtgccgttcgtaacattggtatactcagacatttcttgtcgagatgtgggaacagaagatattgaaagtatttttccagggaattgaccaaatttatctgatgggaatgcagcataacgaatgttaattacatccccaggttttacataaggtatactattgttaggtaaccataaaataagataatactctatatcaccggtaggttttatctgtgctagactgctgcctttatcaaccatttggcctttagtgacggtcaatgattcaatacggccttcagtcgttgctttaataataatgttaccgtttgcgtttgattcaaccagttgatttttataatcattaatctggttttcttgtgacgagatttgattgtcaaaatcagctatttttgtaattttatcactattgagctgagtgacctgcgattccagttgcattttctgactcaccagagactggtaagtgctttgttgttgaaaatacaaagagtgttgatagttatattggtctttggtaatcagtccgtcacttaaatacttatcatagctggatagattatcatgcattttctttaatccagcctgggcgttagccaacatgcgattagtttcttttaacgaatcattgattgtttttaactgcttctctaaagaaatggttgtttcttctttattatgattcagttttgaaatgatatcttcagcatttgcgatcttttcattaatgacctctatttgtaccgcactaacattacccgttgtggtgttccgggaaatgtcgatctcatataacggctggcctttggtcacaatatcgccgacttttacatattgggagataacaaagccttgctgcggggcataaacgttgacagagtgaggtagagtaatgacctctccctgaacgtcgattctctgggtaaaggagcaaaatactgtggtggctatcaggatcgcaagaaaagcaaaagagagtaatgcaacaagccatgctggaagccctgcgagcagcagtgcctttcctttccagtgatgctttttatactcaatcgcttccttgcgatagattttttttaacatagttatcgcttaaattataaaatgaaaaggcccgatacgtcaggccttaattactaatgaatgcttgtcaacaaactgttgagctaatcattggcgcgtaaacttagttgctccagaagttcagggtgccgtcataaatagcatccattacgccctgagcataatccagagtcatatcccagccaacgatacccgctgcaataccaaagcaaacgccaccgagaataaccccggcgatcatccctacaccctggccgattgagccgataccgaagataccgccacttacgccaccccaacgtccggcgtacgctgtaccaaaaatagcgcccagagaggcgcccagtgcgatagcgccaacttcttttgcggcccaggtgacgatatcggtaagagtatcggtcagcgcaccgccagaaatttcttccatttcaaatacagttaattggtgcatgattagtcctttaactaaaattaaaattatatattcattccagaccagaatttggtccgcagaaaagatagtcgttgctgtagtatgaatcaactcaactaaatatgaattgttgatgaaattagaggttaatagtgaatcaaatctaaactatttataggttcataaaacagtaactaattcagcaggtggtggcacgcagctattatcgatgtgctgcagatatattgatttattcttgcattcatatatgacatttttttggttgttgacataaaaataaaaaaggtggatatcattatccaccttttgtaggggtatggaggttatacttttactcttcctgtatgacaacttcaagcatagcttttacatgaccggaagagacttcagcgctattgtcactcatgcgataatagtcggcggtgaaggtaaagttttgtgatgcctgtgccttggcgaagctataagtttcggcgtcgtaaaatattataggcttgttgtcaattttgaagataacgccaacgttatttgcggcttcggttccagttatcatgttatcgatgatcccatccccggcagaactggtgccattaacagggttaaaccagtagtaaagcttgttgccaactgaaccttgtgggcaagtcacatccattttgatagttttttgtgatggagttgtacctcctcgagaaatggacattaatgtgtttttttcaattttattcagggtgatttggctaggccctgatactgaaatatcgcaagaggtatctttatatgaaatagtcttgaacttcagggttgctgttaacaaaaggcggtcagctgcccttgggttggtgcttaagttacctgctgagaatttaaataccgggtttgtactggtgccggatgtatcgatgacctgctttgttttaattaaccataccgtcataaatttataatcttcattcgattctaaaataggtacgattgtagattgagcaacagcaggattaatagaaccatttttgctgctcagaagatctgaaaactgaaagccaattccatctatgccggtttcatagactggtttgccccttatacccgtgacgccggtaacttccggtgctgttgattcaacaatatactggtctcccattattttgctgcactcaaatgttttataatgtccggtaccgacttttttagtatagaggactgtacccaccggaattgttgggtctgttgcgattttaggacttatgttaaacattgcttgtccagcggaaccagaataatcgcatttggcaattacctcgctacaacagcatagtagggataaaaaaagaagtatttttctcattctttattgttccttggtcaatattagcgacaaaccgtttcgatttgactgatgccagacgctttgccttccctggctggtaaagtaaaggaagcattgcactgctgcgcggcgcttttgccccactggacgttaaggatcccggtctgctgcaacccggacatatagaccataccggcgtcgctgacgatgcttggctgcgatttgctgtcgccggcgagtagaaccatcgcgccataaggcacgtcctgaccgctggcggttttcagatgcacaaaggccctctggccgatattgccgtcataattagcacgcacgatggcaccacgggtcggcacgacgctttgcgtagtttctggaagctccatatcttcacccagtgaagtgctgtcaagggtgatgtcggtacgacggtaaggtgtaacgtacgggacgatagcgtaaccgcgatagtcggtggagatggtgttatcgttggtcaacttgacgttatccaggcccggcgctttaaccagcacggcggcgtcagtgatgtcctggccaagtgtaatgccatcggcatgagcgacgatgctgccgttggcgccgtagtcaatacgttggctgttattgtcatagctatagccggcattaaggctgccgcgggcaccgttataggtcccacgcatatcgccgctgtaatattcccggttgctgtacccttgctgcaggctccattccaggctgtcgttatctagcccgacgccaccaatggagaccgactgatcggtagatcccggattgctgttggttaattgatagctggtataggtacccggcagccagttgctcagcggtagcgtcaccgtcagggtgatgcgctgatcgtcctgggcatccttacctgagttatttccgctccaggtgtagcggttatagctgtagcccagatagtagttcacattacggaaaccgccgttgtaacctacgctaattgacttgttggttcgcttatcgtcccagtaatcttcaatcaacccgcttatcgacaggctaccgaggcctttacccaggctttggttaaccgtcaggttggtgcgattgcgcagtgagcgagaggtataattaccgtcattagagtagctatccagcacctccgagagggtattaaagccgcgggtggaatagcggtagcccgcgatggtgacattggtgccagtttcgacaatgtttttaccataacggacccgccaggactgtcctgaggtcttttcatcgtctttctttttcgaccatgcctgggtgacgtctgccgaggcggcgccaagctcgcccaggttatagccgaggcccgtcgacagcgcctggtagcgcgaggccgcctgcataccgccataaagcgtcaggctgctggagacgccataggtcgcggtggcctgagtaaatggcgtttcatcgactccaccatcgtaaggacgatatttaccggaagtaatctcatactccagttgattttcacgcaccatgaccggcagggtggcgaacggcacaacaaattcttgcttggatccgtcggactcttccacgctgacgtaaaggtcgccgctaccgccgctcgggtacatatcggtgatttcaaatgccccgggtgccacgtaggtctggtaaacctggtagccgttctgtttaatgacgacgcgggcgttggttttggcgataccgcgaataatcggcgcatagccgcgcatactttccggcaacatcgtggtatcggtggccagctgaataccggtaaacggcacgctgtcgaagatggttgagagcgatgaactttcgcccatcaccaggttactgttgatcgagcgaatacttcgctgcatatagagataggcggagtcccagtccccggcatcgccattgtttttattccatgtgctgaggttgcggatacgccatgggccaacgttgaggccagactgcaggttcaagctgtagtattcatcattggcctgcatgtcgttcgagccgctgaactggtagttcaccagcagggcgttgatgccatcatcaaactgatccggtgggatatatccctgcgcggtggtggataaggccgcctgcggaatagaaatatttaagcgctgggcggtaaagtcaaaatccgctttggtgtccggaatgacagaaaagtttgcacagccgttttgatcctcggctaactctggaaaggattttatccttacgccatattccgcgagagcttttagactcaggcagggaaccagagcgggttcgcggttatcgctgctggcgcgattgttggcgacaaactttatcgtcctggtatccaggtagcggccattaaacatgatatcgacccgataatcccccggcgcctgcgcgttctgggtctgaaatacggataagtcaggagtggttgatggatcgctaccattcaatgagctaatgaatgagggatcgaaaaagtcacgtgcttgcgctttattattcaaaccagaaagcaatgccggaagcattgcaaagaagatggtggatagtttgaataatccattattcttatttggcatagacacatccctataatgataaaataaatttcttattacagcgatgaggagtagagcgacccagctccgccataatcattgacaactttccaggtaatgctggaggcattaatattttcttttaacgtcacttctttagtcgtcatcggggcgaccgagttgacttccggcttcacttctttgctgccaatctggatgctatggaaatagaagaaaaagggcgttggatttttgatcgtcagcttagtgccagactttcgccattcgagctttttcgcttccgtattaggggagaggtcgaaaagtgctttaggacgatagaccagacgcatacggtgacggactgctagttgaatggtgttgttattcgctttggcatcatctgccggaggaatcgccatgacattaaaatagtacatggattcccggtcggtcggcgcattaacgtttccgttagaaaacagacgaaccgtattctgttgtttcccttcaaggcggaacagcggcggcgtggccataaaagagggcgcttttcctgccggcgcttcaacccaggatttaatcagatagggaatatcatctttattttctatttgcgcggtgatttcacgtgcgccttctttatacagatagcgggtggatcccactacaataccggcatgggcaatactgctgaggagtaatgcacaggaagcggtgaaagttaataaagtcctgaacatgttttttctctgaatgcaaaaaagggcccgccgtgaagcggggccctttggggaaaaattagatggtgtaatcgatagtaaaggtcgcaacacctttaaccgggccttcggttaccggagtagcagagttcacttttacataaccagtggtgtacttcagctgagtaccggtagtagcagagtagctttcggtcatggtgtcagaaccgtcgaaggctacgcgatgtgaatcgctgagacgctggataccgataccgataccggtagcgccgccagctgcggtgttgtccaggatggttttatcgctggaggtgacaccggcaacgtttacagtcaggccggtaaccgggttagcgctgccctgtgcgcagtcagtaactttaaaaccgaagtcctgagttttgaacagagtacctgcagcttcagcatttgcttccgcagtggtcacagtgatcagctgaacgataccgttgttcagggtaccagtcggagtcacgacgcaagagttagctgcatcagcgacttcacccagtacagttacctgagcggtgttggttgccattgcctgagcactcagcactgcagatgcagcgaccattacagctacgattgtctttttcatttaattaatccatatatagatacttagtcctgtgtagagttgataacagttatcaagggaatggagtatgcattcgcattgatattgaaaataagcgccagcattcctttatatagtgctgagacaaatcatcctgttgaacaacgctaccatatcgcttgccatagcgaaccatggagaagcgggagtaatttaaaagtctggtgcaaaaaatgcttgtgaattgttgatgaagcacctgtgaatttaatgctgccccccctctctgatgagatgtggattccagttgagattaatttaatctgaaaatctgaccattaagcaagttagctatcgcttgtttttttatctgcggtatcctgtgggctgaacttcaatgtgaaatgtacctgttttcatctgaaacaagaatgttcacataatcgtttggttgaaatcatttgattttattatggataatagggttacgtggggcaaggatatggatgacgcagtattatttaatgggtgtataattaatcaggagattatatttaatgccaatatgaatgagctgcggccgcttgccggggacggggagtgcatcagcctcaatgcgccaaccgccagatgcttgctgctgcttttgcagaattgcggcaaagtcatttcacgggatgagttcctggcggctgtatgggaaacacggggggtggtcgtttcgcaaaatacgttctatcaaaatatctctttgctgcgaaaatcgctggtaaaagctgggctatctgaggatatcattatcaccgtccggcaaaaaggctttagcgtcgctccgaatacattggtcattcctctctctgatgaagagtgcaagaatatgaatcgggtgacattaacgcattatcagaataataaagttgtcgactttatttctgaagaaaaggaaaagcctgacactcatttaaatcttccactaatagaaaactcatcaaagcatggcagtgatttgatggcaaataaaccggaagaaggtgaaaaagcatctgagcggttgcatgttacttttaaaatacccgtatggttaatcgcgctaattgtcgtgatgattgtaattaatattattgtgttggtcgtgctaaaccggtagctcgtcacagccaggggttatagcgcggtgcgatagtcatttgctggtcaccttaacacccgtctgtcgaaatcttcctatccgaaggtgtgccagaacgtcctggcagaccttcagtttattaacgctgcttcagccctaaatccagcggcgtcttgctgggttccccgccgatctcgcgcgccagcttcggcaccatatagccggagatgagggtcaatagttcacgcatgatttcacgggcttcatcatcgctgaccatgaagtgcgccgccccctgcacccgatccagcacatgcaagtagtagggcattaccccggcgtcaaacagcgcattgctgaggtcggccagggtttgcgcgttgtcgttcaccccgcgcagcagcacgctctgattgagcaacgtgacgcccgcctgacgcagcatggccatcgctgcgcgaaactcaccgtcaatttcattggcgtggttaacgtggttaaccaggatcacctgcagcgacgaacgctggaagcggctggccagcgtctcggtgatgcgcgccgggatcacaattggcaagcggctgtgaatacgcaggcgcttaacgtgcggaatagcttccagctgggtcattagccagtcaagctcatgatcctttgccatcagcgggtcgccgccggagaagatgatttcatcaagctgcggatgcgccgcgatgtagtccatcgctgtctgccagttgcgcctggtgccctgattttcggcataagggaagtggcggcggaaacaataacggcaattgactgcacaaccgcctttcaccagcagcagggcccggttgcgatatttgtgcaacagaccgggcaccacgctgtgctgttcttccagcggatcggtggagtagccgggggcgacgataaactcttcctcggcggtaagtacctgacgaagcagtggatcgttagggttgcctttctccatgcgggcgataaacgcgcgcgggacgcgcagcgggaacaggcgtctggcctcgcgtccggccagcagtttttcatcagcgtctacatttaaaagacgcagcagttcatcaggactggtcacaacattggcaagttgcgttatccaatcttctctggatggggtatttagggttacaatatgcgccattttgtggcttagctaccagttaaacaatttcagagggccttatggcgacttactatagcaacgattttcgtgctggtcttaaaatcatgttagatggcgaaccttatgcggtagaagccagcgaattcgttaaaccaggtaaaggccaggcgtttgcgcgcgttaagctgcgccgtctgctgaccggtacccgcgttgagaaaaccttcaaatctaccgattccgcagaaggcgcggacgttgtcgatatgaacctgacttacctgtacaacgacggtgagttctggcacttcatgaacaacgaaaccttcgagcagctgtctgctgacgcgaaagcgatcggtgacaacgctaaatggctgctggatcaggctgagtgcatcgtgaccctgtggaacggccagccgatcgcggtcaccccgccgaacttcgttgagctggaaatcattgaaaccgatccaggcctgaaaggcgacaccgcgggtaccggcggtaaaccggcgaccctgtctactggcgcggtggttaaagttccgctgttcgttcagattggcgaagtgatcaaagtggatactcgctctggcgaatatgtatcccgcgtgaagtaatttcgcgtcatgatgaccggcgtagcctccgtgctgcgccgctcttttcgtacaggcacaacgagcacgatacatgaagcgcagcgttaaactcctggtgttactgtttctgagcagcgcgttgttggctggctgcaataccgcccgcggtgtgggcgaagatattcagggcctgggccacgctatctctcacgctgtgagctgaatttccctgccgtttcgttaatggcgcttgcctcccggtatgtcagcctcctccacgcatactccttttctcttaaaaatcgcaaagatcccttcatctttggacggtttgtctatgcttatagggcatgaaaacaaaactgacactaaggatgacattatggtgaaaaaaacgattgcagcgttctttacggttttggtcctctcttcagcactgaccgcttgtaacaccacgcgcggtgtcggtgaggatatttcagacggcggcaacgcaatctctggcgcggcaaccaaagctcagcaataaacgccgtcaacggtacggtttagcgccgtaccgttcttcacttctctcattccgttggatatactcaccacgacttttcatccaccttacgggacgacccgtaagcgtttctcatccggggacggccccagcaaaggagccttatgtcctggatagtcttgtttatcgctggcctgctggaagtggtgtgggccgtcggcctgaaatatacccatggctttagccgcctggttcccagcgttatcaccatcgtggcgatggtggccagcatggcgctgctctcatgggcgatgaaaaccctaccggtaggtaccgcctacgccgtctggaccgggatcggcgccgtgggcgccgccgtgaccggtattgtgctgttaggggaatccgccagcgccatgcgtatcgccagccttgtctgtatcgtgattggcatcattggcctgaagatcagcgcgcactaatcatagcgctgattgacccagaccagtttgccgacatcaaagccctgtcgggtggcaatgtccagcatctgctgcctgacctccggggcgatggtcggcgcccgggccagcagccagagatagtcgcgatcggggccgcagaccagcgcgtaacgatactccttatccagagcaatgacgttatagctgccgtagaaagggccgaagaaggaaatcttcagcgcggcgcggctgggctccccggtaaagtacgctaccccgtccgttttctgccacataccacggtcggggttatagcctttattgaccacgtccaggccaccgtcatcgcgtgggtgccaggcgatcgtgaccttttccagcccgctttcaaaagggtggtcaaagcgggcgatttcataccaggtacccagatagcgctgaacgtcgaagggactgaccacggtgacgcccggcggcggggcgggcgtgctgcaggcgacagacaggaacgagacggcaatcgcggtgattatcggcaggatacgcatggcatgctccttgctggcttttaagctaagtgtagagtccagcagggaaaaggcggcaagatttttctatgaagcgagcccggtagcagaaatgcgaccgggctcttgcaggatcagataaacagtacgccaacgagggtgatgacgctgaggattgccgccaggccgtagaagacccatttaccgtttggcacatggattttcagatcgtgcatggcgtggtgaatacgatgcaacccacaccacagcggcaggacaatcatcagaaagatgaacgcgcggccgataaagctttgggcaaaggccagcacacgctcatagctgaaggcgtcggccggggcgagcccaagcggcagcaggatgccgaccagcagcaccatcaccggcgcgacgatcgcgccccacatgccgcctgcgccaaacagcccccagaatacgggttcatcggaacgtttcggattgggattaatcatctcagcctccttaccagaacagggcgacaaacaggatcaccacggtgaccaccgccgtcaccacccagagccctttaatgaccggctctggccccattttttcgcctttgatgatgacgttggcggctttcggcgccagctcaaaccaggttttggtgtgcagcagcgccgccgccagggtaatcaggttgaggatcaccaccaccgggttttgcaggaatccgatatatcccgcccagctctcggcgccgtgcttgagggcaaacagcccataaatcagcacaatgctaaaccataccgtcggtaccgccgtgccttcccgtaccatgtagaagcgataaaacggcagctttttccaccaggtggaggtcattggccgcacgtagggtttgcgtttcgtcgtcataatgcactccttagcgtggtttcagggtggcgataagaaagtctttcgagctttccaccttgccctgctggatcgcggccgccgggtcgacgtgcttcggacacacttccgagcagtagcccacgaaagtgcaggtccagacgccattctggccgttaagctgcgccatgcgttcctttttaccgtggtcgcggctgtcttcgttatagcggtgggcgagggtgatcgccgccgggccgataaattccgggttcaggccgaactgtggacaggcggcatagcacagcccgcagttgatgcagccggaaaactgatggtatttcgccatctgggccggggtctgcttgtttggcccctggtcaggcgtgcggttattgccgatgatatacggcttaatggcttccaggctttcgataaagtgggtcatgtccaccaccagatcgcgctcgatcgggaagttggccaatgcctccaccttgatgcctttggtgtaatcgcgcaggaaggttttgcaggccagcttcggcaccttgttgaccatcatgccgcaggaaccgcagattgccattcggcaggaccagcggtagctcaggtctggcgccaggttgtctttgatgtagcccagcgcgtccagcagcgaggtctgttcatcgtaaggcacgtcatagaatgcgctgtgcggtgcggtgtcgacctccggattgtagcgcaccacttcgactttcaggtttttcatctcagccatgggtggtctccttcttctcagccgcgtccgcttctgcgccatagacacgttttgccggcggcagcgtggtgatcttcacatcgccatattccagacgggtagtgccatcggcctcgcggaaggcgagagtgtgcttgaggaagttgacgtcgtcgcgttcggtacagccttcatccaaacgctggtgcgccccgcgcgattctttacgggcgatggccgagtgcgccatacattcggcaacgtttaaaccgtgccccagctcaatggtgtaaagcagatcggtattgaacacgctggagttatcagtaatgcgcacgcgcttaaagcgttcctgcagttcagccagcttgtcgatcgttttctgcatcagctccggcgtgcggtagatgccgcagccttcctccatcgacagccccatttcatcgcgaattttcgcccagttttcgttaccttcctggttgacgagatctttcaggcgctgctccacatcggcagcctgcgcatcgagggcggcgccgtttgcctcgcccgcctgagcggcgcgctgcatggcctgctccccggccaggcggccgaagaccaccagctcggccagcgagttggagcccagacggttggcgccatgtaagccaacggacgagcattcgcccacggcaaacagccctttgattcgggtttcgcactgctgatcggtttcaataccgcccatggtgtagtgcgcggtcgggcgcaccgggatcggctctttcaccggatcgacgccgacgtaggctttcgccagttcacagataaacggcagacgctccagcagttttttctcgccgaggtggcggagatcgaggtagaccacgtcgccgcgcggcgtcgggatggtgttccctttccgccactcgtgccagaaggcctgggacactttgtcgcgtgggcccagctccatatatttattcttcggttcgccgagcggggtttccgggcccatgccgtaatcctgcagatagcggtagccgtttttgttgaccagaatcccgccttcgccgcggcagccttcggtcatcaggatcccggagcccggcaggccggtcgggtgatactgaacgaattccatgtcgcgcagcggcacgccatggcccagggccatccccatcccgtcaccggtgacgatgccaccgttggtgttgtagcggtagacgcgcccggcgccgccggtagccagcaccacggcgttagcgcggatctgcaccagggtgccttccatcatattcatcgccaccaggccgcgggcctgcccgtcatcgaccagcaggtcaaggacgaaatgttcgtcaaagcgctgaatttggggaaactgaagggaggtctggaagagggtatgcagcatgtggaagccggttttgtcggcggcaaaccaggtgcgttcgattttcatgccaccgaagcgccggacgttgacgctgccgtcggggcggcggctccatgggcatccccactgctccagctgggtcatttccgtcgggcagtgatgaacaaaatagtcgacgacatcctgctcgcacagccagtcgcctcccgcgacggtgtcgtgaaaatggtactcaaagctatcgtgatcctgggcaacggctgcggaccccccttctgcagcgaccgtatggctgcgcatcggatagactttagaaatcagggcgattttagcgttggggttggcctgagcggcggcgatagcggcacgaaggcctgccccgccggcgccaattacggcgagatcggcttgaaaagtttgcacgacattcctccagttttagtgtatttcgccgccgggctggcgaaaaagtatcactgctcctttataggtacaggagtatagccttagggtcagtatggaaaattgacgtgttcgatttttttatcgatatgtgcggttatttatcagtggtatttatgcgtcagggttaacgatagattaatggcatgtagtctgccggagattgcacaaaatttgtttcactcgccggttgcgagtagacttcgtgcccttaatttgcaatcggagaaagtaccatgagcgagacggcaacctggcagccgagcgcacccattcccaatctgttgaagcgcgcggcggtgatggcggaaatccgccgtttctttaccgatcgcggcgtgctggaggtggagacgccttgcatgagtcaggcgacggtaacggatattcatttgttcccgttcgaaacccgtttcgtcggcccgggccattctcaggggcttaacctgtacctgatgaccagtccggaataccacatgaagcgcctgctggcggcgggttgcggcccggtcttccagctgtgccgcagcttccgtaatgaagagatggggcgtcatcacaatccggaattcaccatgctggagtggtatcgtccatgctatgacatgtatcgcctgatcaatgaggtggacgatctgctgcagcaggtgctggagtgccaaccggcggaaagtctctcctatcagcaggcgtttcagcgccatctggaaattgacccgctctctgccgataaagcacagctgcgtgaagtcgcagcgaagctggatctgagcaatatcgccgatactgaagaagatcgcgataccctgctgcagctgctgttcaccatgggcgtggagccgcacatcggcaaagatcgaccaacgttcatttatcatttcccggcgactcaggcctctttagcgcagatcagcccggaagatcatcgggtcgctgagcgctttgaggtctattacaaaggtattgagctggcgaacggtttccacgagctgaccgacgcccatgaacagcgcctgcggtttgagcaggataaccgcaaacgcgccgcgcgcggccttccgcagcagcccatcgataacaacctgctggcggcgctggaggcgggtctgccggactgctccggcgtggcgctgggcgttgaccgcgtggtcatgctggcgctgggcgctgaaagcatcggcgaagtgatcgcctttacggtagaccgcgcctgatcgctttttcacctccctccgccggcgggtgggggaggtgaaagacgactctgaacctgacaccctcgccccggctttagcccgaatacccacaatttccctccgtgattttgctactatccgcgctctttttatgaggccaggcgtcgctcgtcgggcgatgcccacgtttggatagatttatgcatcaacaactcaagaagatgagcctgatcgggctgattctgatgatcttcacctcggtgtttggctttgccaacagcccatcggcgttttatctgatgggctatagcgcgatgccgttttaccttttttccgccctctttttctttatcccgttcgcgctgatgatggcggagatgggctcagcttatcgtcgcgaagagggcgggatctattcctggatgaaccacagcgtcgggccgcgctttgccttcattggtacctttatgtggtttgcctcgtacgtagtgtggatggtgagtaccgccgctaagatctgggtcccgctatctacttttttgtttggcgcggacaaaacccagacctgggcgctgggtagcctgacgccgacgcagacggtcggtattctggcggcctgctggatggtcgtggtgacctttattgccgtcaaagggatcaataaaatcgctaaaattaccgccgtcggcggtatcgcggtgatggggcttaacctggtgctgctgctggtgagcggggcgatccttctgcttaacggcggtcatttcgcccagccgttaaacttcaccctttcgcctaatcccgggtatcagtcgggcatggcgatgctgtcgtttgtggtatttgccatctttgcctatggcggaattgaggcggttggcggcttagtggataagaccgataagccagaaaagaactttgccaaaggtattatcatcgcggcgatcgttatctcgatcggttactcgctggcgattgtgctgtggggcgtgagcgccaactggcagcaggtgcttggcgcgcgttcgaccaacctcggcaacatcacctatgtgctgatgaccagcctcggggcgacgctgggccaggccctgcacctgacccctgcggcgtcagccctgaccggggtctggttcgcccgtattaccggcctgtcgatgtttctcgcttacaccggcgcgttcttcaccctcagctattctcccctgaaagcgattatccagggcacgccaaaagcgctctggccgtcggtgatgacccgtctcaacgtcaacggaatgcccgccgcggcgatgtggctgcagtgtctgctggtcggggtgtttatcgtactggtatcgttcggtggggatagcgcttccgcgttttataacaagctgacgctgatggccaatgtctctatgaccttgccttatctgttcctgaccatcgccttcccgttcttcaaggcgaaaacccatcttgaccggccgttcgtgatcttcaaaaaccgtccgtcgacgctgctggcgaccggcgtggtgctgctggtggtgaccttcgccaatatcttcaccattatccaacccgtcatcgacagcggggactggaacagcaccctgtggatggtcggtggaccgatcttcttctcactgctggcgctggggatctacgaaagctaccgtcggcgcatggcgtccggcgcgctggtgatggagagttaaagagcctgcccggcggtgccgccgggcaggggatggtttacaggctaccagccgtacggcggctggtttttccggccgaggtcatggttttactgctttgcctgccgtcaatactttccagacgcatctggaacggagggaacggcatatcaatgccatgctcgcggaagcccgccaggatcagctgatgcatctcatggcgcagcggcatgcggtgccccatctccgcggcaaaaatacgtagctcgaaaatctggatcccctgctgcaggtcgacgagaaacgcctccggcgccggggtatcgatgaccagcgagcagcgatgcgccgcggcgatgagaattttcgtcacctcttcggtatcggcgtccacaggcgccggcaccgtcagcaccacgcgggtaaccgagtccgacagcgaccagttgataaactgttcggtaatgaacgccttgttcggcacgataatctcttttcggtcccagtcgctgatggtggtcgcacgggtattaatgcgggtgacgctgcccgtcaggtcgcgaatggtgaccgtatcgccgatgcggatcggcttctcaaacaggataatcaggccggagataaagttggcgaagatctcctgcaggccaaacccgagacccacacccagcgcggcgaccagccactgcagcttcgaccactcgataccgatcatcgagaagcccaccagcccgccgaccagcatcagcagatacttagtgatggtggtgatggcgtagccggtgccgggggttaaatcgagatgctggaggatcgccagttccagcagcgcgggcaggttgcgtaccagctgagtggtgatgatcagcaccagaatggcaatcaacaccgcgccaagcgtaataggctcaaggctttccaccccttgtaccgtcgaggtcacgtcccacagcgagatattctcaaggaagccaaacgccgagtgaatttccgaccacagcacgatgaccgatagcagcgcgatcagcatcagcagggagcggacaagccgcagcgactgggtactgatggcatcgaggtcgacctcgctgacctccgtctccaccgacccttccgggctgctgacgtgaacgggctcatcttcgccgcgggcgcgctgagcgagaatttccgcgcgacgatggcgggcccggtcgaaggccagccggcggcgctggatcagcatccagcggcggatgatgtgatagaccaccagcagcaggaaccagatggcgaccgaggtttccagacgcgcaagcagcgcctgggcggtggcgaggtagccgacggcggccgccagcatggccaccagcggggcgccaagcatcaggttccacagcaggcggttcaccatattgtcgccattcccctctttatccagatagagcggaataccggcgtgcttaaggctcagggtgaccaccgccagcgcgccgcagatcagcaggaagcacaggcggcccagcgaagcggagaattcgcggtcgttaagattatcgaacatgatcagcgccataatcagcggcacaatcagcccgatgctcatcaggtagtagcgcatcgccttcgccacgcggctacgcggccagccgaagtgggcgataaacagcccgtttggccgggcgaaggtggcgcagatcatcaccacccacagcagaggcaccgtcgcggtgactccatcgccaatcgccaccgccagcgggaacggccaggcggactgcagaccatagccgagcgtcatccacagcaccggcagcggcgaggccaccagtatcgaccagaagaccgtgcgcagcgtcagccagaagtgatcctgagtgactttccccacccgggcgctggagcgctcgagaaagcgggtgaaatggcgccgcgagctgatgctaaagccaaccagcagcagggcggcaaacagcggcagcagggtctctttgctggtaagcatcatcgcgctggctttacccagttcgctgatggtatccagggagatcaggcgccgcagatcctggacgatctccagcggccaggagaagccgatggggctgacgtccgaagtccagaacagatagcggtgggtggcttcgttgatctctttcagcgcgtcttccagctggccgttggcgaccttcagcttggtgagctccagcatcagggtatcgccgccgcgcagcagcgagttcagcagctcgttctgcgtgcgcagctgcgcctgcaggatcttgttctgctcgctggtcagcggttcgccgtcggcctggcggatctgccgcagctgcggctgcttactcagcaaatcttcaaagcgcagacgctgcacgcgcagctgcgccatttccgtatccagctgctgcgggcgagggcgctccggcagccgcgccacctgggcgcgcagggcttcgcccagcagattggaggagcccagccactgcgactgctcgcgcagggtgtttaacgcctggcgcacctgcagcgtttgattcgtcgcctgtcgctgctgggatgccaccagatccatgcgctgcgcctgctggttcagcgcctgggagagctcacggttgaccttaaactgggcggtgatgtccggcggcaggttttcactgttctccgccagcagttcggtactctccagcgccttttccgcctcccgctggcgctggctgttttgcagattgcgcagcgcctgcagataggcatccagctgctcgctctgcttttgcgccagctcggaacgggcgcgcgacagctcctggcggttgttggcggagagctgggcgaggtcgagttcatccaccagcgccttcagacgcgctgattccgcctgcagggcaagattttgcgcctgggcgagagcattgttgccggtttgcgtgccgatgcggcgctcaacctcattgagctgacgacgggcatcggtttgctgctgcggcagctggttcagggagtcggcgatttcacgcgcgcgatcctgctcctgctgcgcctggcggctcgattccagcagttggctgctgacctgcaggatctcctggttcagcgcatcggcggtcaggccggttggcacctggcgcggctcttcgctcagattattgagctgggcacgcaggctttgaaacagtttggggaaattgtcgataacgtcctgatactgacgggcgcgctcgagggatgattttcgctcctcaagcgcgttcagcgcggactgcagaacttcaacggtttcaggctgggcgggctttgccgccttcgcctgttccagttcctgggttatctgtttagcatccggggctgtcgcagcgtacgccccgaaactgaggctcaaggccaacaggaaagtgtatatcaggcgcacggcataacccttttgctgaagaattaaccttggtcttgtttatcatcaaccagcgggctggcgcggtgttcggcgcggatctcttcttccggtaacggcgcgggttcagcggcggcggtcgcttccactgctgtcgccagcggttggccgatcttggtcacggacaggctttgcagcgtgtcgaccagcttcacctggcccggggcaaacaggttgatcacggtggaacccagtttgaagcggcccatctcctggcctttcagcaaggcgatggagccttcgttgtcgccagcgggccaagtccagcgtttaataatgccttcgcgcggcggggtcacggtgccggaccacacggtctcgatgctgccgacgatagttgcgcccaccagaatttgcgccatcgggccaaactcagtatcaaacaggcagatgacgcgctcgttacgggcgaacaggttcggcacgttctgcgccgtcaagtggttaacagagaacaggtcgccaggaacgtagatcatttcgcgcaggatgccgttgcacggcatgtgtacgcggtgatagtcgcgcggcgacaggtaggtggtggcgaagctgccgttacggaacaggtcggccatctgatagttgccggccagcagggcttccagactgtagtcatgacctttagcctgcaggattttatcgttctcaatggcgccaagctggctgatcacgccatcggccggcatcaccagcacgtttggatcggtattcagcgggcgaacgtcgtcgcgcagcgggcgcacgaagaaatcgttgaaggtgcgataagccgcggtatccggcttctgcgcctctttcatatcgaccttgtagtatttcacgaacagatcgatgaccagcttcgtcagccaacctgcgcgtttgctcgcaccccagcctgcgaggcgggtgagccacagtttaggcagaatgtattgcagtgaaagtttaagatcgtttaacaaagtagcctccaggccatgatatgtcgttcctgacccccgcctgcgggcggggacctgaaaaaaggggacgattctatacgtaaaactcgccaaatggcatccgcgtaagctgcgtcatcatcgctgcccggcagcgcctgacgtgatgctcagcttaatgatcagtcatcggacgaggaaaagtttttacgcgtttttacctgtacctgcgccatgctttccaggatgcggtggtagttctcaaaacggctttcggcgatcttgccgttctctaccgcttcgcgaagcgcacagccaggatcggtatcgtgtttacagtcgcgatatttgcaacggcctaaataatcatggaattcgacaaagccgttggtgatttgttccgcttccagatgccacaggccgaactcacgtacccccggtgaatcaatcacatcgccgccgtgcgggaagtggtagaggcgtgcagcggtggtggtgtgttgacctaagccggaaacgtccgagacatcattggtgaggatctgatcctcgctcaacccgagcagggcgttcagcaggctcgatttaccgaccccggactgcccggcgaagatactgatgcggtcggtcagggccgcttccagcggcttaaggccgtcctgagtccgactggaaaccagcagcacgcggtaaccgatgttgcggtagatatccatttgctcattgacgaagcgcagaccatcatcatccagcagatcgattttattcagcacaatgagcggctcgatatcctgcgcttcgcaggccaccagatagcgatcgataatattcagcgacagctcaggcaggatcgcggaaaccaccacgatctggtcgatattggcggcgataggcttcacgccgtcgtaaaaatccggacgcgtcaggacggaggcgcgatcgtgcaccgcctcgacgatccctttgacgcttacgccgtcggcggcgtctttacccggccgccagaccacgcggtcgccggtgaccagcgagcggatcgtccggcggatattgcagcgatgcacgctgccgtcagcggattcgacgtcggcatgcataccaaagcgactgatgacaatgccttccgacgtttcgccaaacaggttgtcatcgtagtcggccttctccgcagtggttttcagacggcgctggtggttggctttgacgcggcgctgctggcctttggagagtttatttttactcaatcgaactggctcctggtcgccctgatggggcaaaacctctatgatacacgctattttagatgaatatagtcacgcgagaagggtggaaaatagcatgagtgcaaatgaaaacaacctcatttggatcgatcttgagatgacagggctggatccggagcgcgatcgcattatcgaaatcgccaccctggtgaccgatgccaacctgaacattctggctgagggcccgaccatcgcggtgcatcagtcggacgctcagttggcattaatggacgagtggaatgtgcggacgcataccggcagcggtctggtggatcgcgtaaaggccagcaccgtcagcgagcacgatgccgaactggcgaccattgagtttcttaagcagtgggtgccggcgggcaagtcgccgatctgcggcaacagtatcggccaggatcgtcgcttcctgtttaagtacatgccgcaactggaagcctatttccactatcgctatctggacgttagcacgctgaaagagctggcgcgccgctggaagccggaaattctcgacggctttaaaaagcagggcactcatcaggcgatggacgatatccgcgagtcggtcgccgagctggcttactaccgcgaacacttcattaaactgtaaaccgcgaccgggccctgtgcgcggcccggtacacttttctgcgttatttaaaccacttctgctgcatctgctggaagtcaggtgtcgccatgaccgcggccagggcatcgttgatggcgttcagcagctccggatcgtctttgcgcaccgcaatcgcatactgcttaccgtaataagccgggtcggtggcccgttcatccatgatggcgtagtcagggttctcctgctgccaggcgtcgagggtggcgaagtcgcccatgacgccggttatttgcccggctttcagcgcggccagggcgctggcgacatcgtcgtaagggacagcctgtacggctttctgtttatcacgcaggtagcgctgatgcagcgtgcctttcaccacgccgacttttttagccttcagatcggcaaaggtatgggcgacatctttgttgacgatcactaccccggagagcgcctggcgatagggtcggctgaaggcgacctgcttctcacgcatcgggatcacttccatgccggcaatcaccgcgtcaaatttcttaaagcgtaaagccgggatcagggtatcgaaacgctgcgccgtgaactggcactgcgcctgcatctgctggcacagggcgtgcgcgagatcgatatcgaagccaacgggctgatttttgccgttggcggtgacaaacggtggattggccgtggtggtgccaaaatggagcgtctcggctgacgcggttccgatggccagcgtgctcagcagcaggacggtgaggacttttctcatgctaattccctgtttggcgtcggggtggcctcgttatacgtcgcgccaccgctgtatgatgcgagcgattttgcgtcattcagccgggcggaaaaagcgattttgcccgttatgacgcttatttatacaattcagcggcgtagatggcgagaaaatgtccatttaaacaaaaaacgcaaaaaagtgatcgtcagggggttgcaggggcatcgaattctcgtataatgcgcctcccgtaacgacgcagaaatgcaaattacgacgccatcgaaatatggcaaaaaatgcagtaacgcgggaatagctcagttggtagagcacgaccttgccaaggtcggggtcgcgagttcgagtctcgtttcccgctccaaaatttgaaagcaccatcctgatcaaaggatttcatctcgcagatgcggggcgaaagccgaagattaagcgggaatagctcagttggtagagcacgaccttgccaaggtcggggtcgcgagttcgagtctcgtttcccgctccaaaatttgaaagacataccacaccagtcgcagttttcaggttgctagacggtagcttgaatgacgatgattaagcgggaatagctcagttggtagagcacgaccttgccaaggtcggggtcgcgagttcgagtctcgtttcccgctccaaattttcttccatctcttatttatccacagtgcaatccagcgccggggatgattttcgtttggtcctcagaaatactgtgaacagagttatccacaggttatcgttccgtcactggcggcgcaaatgcttcgctttgtaaatagtatctttgtatgtgattgaaatttaacaaataaatttcatttcaaaatgttaatccgatcacttgaccttggtctgcgccttgaaacgcaatgtgttttagattttattcacagcctgtgaatgaatcaggcgtcgcgcggcaagcctttctctaccactctgaccagacgtaattttttcggcagctgtacttcaacggcgtcggcgttccgctttttcagttgctgggcaatcgcccactcaatgtgttcgtcgagaagcgggtgctcgccccggcggctctccagggcgcgaagatgggcttcatcccagggggcattgcccaacgcgacggcgatattgcgcagccagcgcaggtggccaatgcgacgaatcgccgacccttcggtcaccttcagaaaccacgcttcgctccaggcgaacagctccaccagcggcggggcatgcagcgctttgcgtgggctgaaatcctcttcatcggtgagctgtgagaaacggttccacgggcagatcagctgacaatcatcacaaccgtaaatacggttgccgattagtggacggaactcctcggggattgcaccttccagttcaatggtgagataggagatgcagcgccgggcgtcgacggtatagggctcaacgatggccccggtgggacagatggtcatgcaggcgacgcagcgcccacactcctccgcgaccgggctgtcgaccggcaggggcagatcaatcagcagttcgccgaggaaaaagaacgatccggcgtcgcggcttaagataagtgagtgcttacctgtccagcctaggcccgctttttctgcgattggccgttccaggataggcgcggaatcgacaaaaggtctaaaattgagcgaagcacactgttcctggatcttctcccccagctttttcaggcgattacgtagcagcttatgataatcacgcccgagggcataacggctgacgtaacccagcgtgggatctttcagggtgcgggcaaaggcggcgttagcgggcagatagttcatccgcacgctgatgacgcgtaacgtaccgggcagcagttcgtggggacgggcgcgcatcataccgtgacgggccatccattccatttcgccgtggtattgtttatccagccatgcctgcagtttgggttcactggcgctgaggtcggtatcggcgatccccacctgctggaacccaagctctgtgccccattgtttgatttgttgcgctaactgaacgagatcgaggggctgtgacatgatggaccatacaatgacgaaaaaccctgacagtataccatacaacatttggcctgcggaggcgctgcgcctggccgaacgagaggcggcggacagcctggggctgacgctgttcgaactcatgcagcgcgcgggcgaggcggcgttccagctggccagctgtgcttatcctgccagcgcgcactggctgatcctctgcggacatggcaacaacggcggcgacggatatgtcgttgcgcgtctggcacaggccgcggcgcggcgggtgacgctgctggcggtggagagtgacagcccgctgccggaagaggcgcaggcggcgcgggaggcgtggcttaacgccggcggcgtgatccatgcggcgaccatcccatggcccgacgatatctcactgattattgatggcctgctcggcaccggtctgcgcagtgcgccgcgcgatcccgttgcggcgctcatccaccaggcgaaccaccacccggcgccggtggtggcgctggatatcccttccggcctgaatgcgcagacgggcgcgacgccaggtgcagtggtacaggccgaccatacgctgacctttatcgccctcaagccggggctgctgaccggcaaggcgcgggatgtcgtcgggcaactccaccatcatgcgctggggctcgaacgctggctcgccggacaaagcactcctctgacgcggttttgcgccgcccacctcgccgactggctgccgccgcggcgggccacctcccataaaggcgatcacggtaaactggtgattgtcggcggcgatcgcggcacggcaggcgctatccgtatgtgcggtgaagcggccctacgcagcggcgcgggactggtgcgagtacttactcacccggagaacgtggcgcccattgtcaccgtgcggccggaattaatggtagatgaactgacgccgcagactctgaaagccgcgctggagtgggctgatgtggtggcgattggccctggcctggggcagcgcgaatggggacgcagcgccctgcggacggtggaaagttttaacaaaccgatggtctgggacgccgacgcgctgaacctgctggcattcaatcccgataaacgtcacaatcgcgtgctaacgccgcaccccggcgaagcggcccgtctgctgaacgtcagcgtggcagaaattgaaagcgatcgcttactttctgcgcagcgtctggtaaaacggtatggcggcgtggttgtgctgaaaggcgcgggcacggtagtggccagtgaaagcggggcgatgggcattatcgataccggcaatgccgggatggccagcggcgggatgggcgatgtgctcaccggcatcatcgccgcgttgttaggacagcacctgacgccgtatgatgctgcctgtgccgggtgcgtcgctcatggcgatgccgccgaccgactggccgcccgcgagggcacccgcggcatgctggcgaccgatctcttttccacgctcaggcgtgttgttaacccggatgtgattgacgtagaccatgattaaccgagtgattcctttacccgatgagcaggccacgctggcccttggcgaccgcatcgcgcaggcctgtaccggcgccaccgtgatttatctgtatggtgatttaggcgcggggaaaacgaccttcagccgcggctttttgcaggcgctcggtcaccgcggcaatgtcaaaagcccaacttataccctggtggagccctataccctcgagaacctgatggtgtatcacttcgatctctaccgtctggcggatcctgaggaactcgaatttatggggatccgtgattattttgccgacgatgccatctgcctggtggaatggccgcagcaaggcgcaggtgtcctgcctgacccggatgttgaaattcaccttgattaccaggcacaagggcgtgaggcgcgtattaccgcgatctcctcacggggtgaatctttactggcgcgtttagccttttagcctgaaggatgacgggatgaagtatcgcataaccacctggcttgccgctgcgctgatgctgtcgagtcttcacgccactgcggcgagtttatccgatatccaggtctctaacggagaccagcaggcccgtattaccctaagctttgtcggtgagccggagtactcctttaccccacagggtaaacgtctggtggcgctggatatcaagcagaccggcgtattgcagggactacctctgcagtttagcggcagcaacctggtgaagagtattcgcgccggcacgccgcaggatacgcagacgctgcgtctgctggtggatctgacggaagatggcaaaacccgggcggtgaagcaacagaacggggcgaattacacggtggtctttaccatcaacgccgacgcgccgccgcctccgccgcccgtggtggtgaaacgggccgacccgccgccggtgatgccttcccggacgacgacgtcagggcgtaacccgttcagctcgtcgggtcatgaacggcagacggtgatgacctcctctcagccggcgatgaccaacaatcagaccgtgactcgcccggcggcccgcacggtgtcggcggatgataaagtcattatcgccattgatgccgggcacggcggccaggatcctggcgcgattggtccgaacggcaccaaagagaaaaacgtgactatcgctatcgcgcgcaagctgcgggcgttactgaacgccgatccgcagtttaagccggtgctgacccgcgacggggattactttatttcggtgatgggccgctctgacgtggcgcgtaagcaaaacgccaatttcctcgtctctatccatgctgacgccgcgccaaaccgcgatgccactggcgcctcggtgtgggtgctctcgaaccgtcgcgccaacagcgaaatggccggttggctcgagcagcatgagaaacagtctgaactgctcggcggtgcgggcgatgtgctggcaaacagccaggccgacccctacctgagccaggcggtgctggatctgcagtttggtcattcccagcgcgtcggctacgatgtggcgaccaacgtgctgagccagctgcagcgtattggcaacctgcacaaacgccgcccggagcatgccagccttggagtgctgcgctcgccggacatcccgtcgatcctcgtggaaacgggctttatcagtaacaacggcgaagagcggctgctggggagcgatgattaccaggagcagattgcggaggcgatttataacggcttacgcaactactttatgcagcatccgctgcagtcggcgcctcgcggcgaggcggcgcagaccgccagcgccgcggcgccgggcgggatgttgattaactaaggagcaggggatgccgattcaggttctgccgccgcagctcgccaaccagattgccgccggcgaggtggtggagcggcccgcgtcggtggtgaaagagctggttgagaacagtcttgatgcgggcgccacgcggattgacattgatatcgaacgcggcggcgcgaagctcattcgcatccgcgataacggcagcggcatcaaaaaagacgagctggcgctggccctggctcgtcatgcgaccagcaagatcgcctcgcttgacgatctggaggccattattagcctcggctttcgcggcgaagcgctggccagtatcagttcggtagcgcgcttaacgctgacttcgcgcacggcggagcagcaggaagcctggcaggcgtatgctgaaggccgcgatcaggcggtgacggtgaagccggcggcgcacccggtcggtaccactctggaagtcctcgatctgttctataacaccccggcgcggcgcaaatttatgcgcaccgaaaagaccgagttcggccacattgacgaggtggtgcgccgcattgcgctggcgcgcttcgacgtcactatcaacctcagccataacggcaaggtgatgcgccagtatcggggagtcgctcaggatggccagcgcgagcgccggctggggacaatttgcggcgccgcttttctcgaacatgcgctggcgatcgagtggcagcatggcgatctgaccctgcgcggctgggtcgccgatccgctgcataccaccccggcgctggcggaaattcagtattgctacgttaacgggcggatgatgcgcgatcggctgatcaaccatgctatccgccaggcctgtgaagacaagctaggggccgatcagcaaccggcgtttgtgctgtatctggagatcgatccccatcaggtggatgtaaacgtccacccggccaagcatgaggtgcgttttcatcagtcgcgcctggtgcacgactttatctaccagggcgtactgagcgtactgcagcagcagcttgacgcgccgctggcggaaaaagacgacccgccggcgccgcgccagatgccggagaaccgcatcgccgcgggaggcaaccagtttgcgcggccagcggaagcgcgggaacctgcgacccgcttcagcatcacgccatcgcgtgagcctgcggcctccagcggcaaaccgggcggcgcgagctggccgcatgcgcagccgggttaccagaagcagcagggagcgctttatcgtcaactgctcgacacgccaacggcgccaaagccagcgttgcagcctccggcggcggcagagttggccggtcacagtcagagctttggcagagtgctgacgattgttggcggcgactgcgcgctgctggagcgcgagggcggtctggcgctgctgtcgttgaccgttgccgagcgctggctgcgccaggcgcagttgaccccgggagcggaggcggtatgtgctcagccgctgctgatcccgctgcggttaaaagttacggaaggggaaaagcaggcgctggccgccgctcagccggcgctggcgcagctagggatcgatgtgcataccgatgccctgcacgtgacggtgcgcgcggtccctttacccttaagacaacaaaatttacaaatcttgattcctgaactgataggctacctggcgcagcaaaacgcattcgacgtcggcaatatcgcccaatggatggcgcgtaatctgacgagcgaacagacgtcatggaatatggcgcaggcgattgcgctgctggcggacgttgagcgtctttgcccgcagctggtgagaacgccgccgggtggcctgttacaacctgtagatctccattcggcgatgaatgccctgaaagatgaatgatgtaaccgaggcgagcctgcccaaggcaatttttttaatgggcccgacggcctccggcaaaaccgcgctggcgatagccttacgtaaagttttgccagtagagttgattagcgttgattccgccctcatttatcggggaatggatattggcaccgccaaaccggatgctgcggagcttagcgctgcgccgcatcggctgctggatattttggatcctgcggaggcctattccgcggcggattttcgccgcgatgcgctggcggcgatggcggatattgtcgccgccgggcgaattccgctgttagtcggcggaacgatgttgtatttcaaagcgttgctggaaggattgtcgcccttaccgtcggctgacccagaggtcagagcgcggattgagcagcaggccgcagagcaggggtggaatgcgttacatcagcaattacaggagatcgatcccgtggctgctgcgcgtattcatccaaatgatccgcaaaggctttcccgggcactggaagtttttttcatttcgggtaaaactttaacggaactgacgcaaacgtcaggagacgctctgccatatcaggtgcatcagttcgccatcgccccggcgagccgtgaactgctccatcaacgcatagaacagcgttttcatcagatgttagcttcaggttttgaagcagaagtacgggcgctttttgcccgcggagatttgcatacggacatgccttccatccgttgtgtcggataccgccagatgtggtcatatctcaatggcgagatcccgtatgatgagatggtttatcgaggtgtttgcgccacgagacagttagccaaacgtcaggtcacctggctgcgcggttgggaaggtgtgcactggttagacagtgaacaacctgaacaagcgctcaacaaagtattacaggttgttggtgcgagccagaactgaacgtgtacaattaaacggtatcgtgcgtaattttttttgagaatcgtaaggttctgagtacaaaacaagcatacatataaggaaaagagagaatggctaaggggcaatctttacaagatccgttcctgaacgctttgcgtcgggaacgcgttccggtttctatttatttggtgaatggtatcaagctgcaagggcaaattgagtctttcgatcagttcgtgatcctgttgaagaacacggtcagccagatggtctataagcacgcaatttctactgttgtcccgtctcgcccggtgtctcaccacagcaacaatgctggcggcggttccagtaactatcaccacggtggtagcgcgcagggttcttctgcgccgcaacaagacagcgacgacgccgaataaggccagtgctgtttttccacgccggggagccaggttttctgcgttccccgctggtattttataaggggtttacgcttgtttgaccgttatgacgccggtgagcaggcggtactggtacacatctatttttcgcaagacaaagatatggaagatctccaggagtttgaaactctggcctcttccgccggtgtcgaagcaatgcaggtgattaccggtagccgtaaagcaccgcacccgaagtattttgttggtgaaggtaaggcagtcgaaattgcggaagccgttaaagcgaccggcgcttcggtcgtgctcttcgatcatgccctgagtccggcgcaagaacgtaacctggaacgcctgtgcgaatgccgggttatcgatcgcaccggtcttattttagatattttcgcccagcgcgcgcgcacccatgaagggaaattgcaggtcgagctggcgcagctgcgccatatggcgactcgccttgtccgcggttggacccaccttgaaagacagaagggcgggattggtttgcgtggcccgggtgaaacccagctcgaaaccgaccgccgtttattgcgtaaccgtatcatgcagatcctgtcgcggctggaaaaagtcgagaaacagcgcgagcaggggcggcggtcgcgtgcgaaagccgatattcctaccgtgtcgctggtgggctataccaacgccggaaaatcaacgctctttaaccagatcactgccgccgaggtctatgccgcgaaccagctgttcgccaccctggacccgacgctgcgccgcattgacgtccctgacgtcggcgaaacggtgctggccgataccgtcggctttattcgccacctgccgcacgatctggtagccgcgtttaaagcgacgttgcaggagacgcgtcaggcgacgctgctgctgcatgtgattgatgcggcggatgtccgcgtgcaggaaaacattgatgcggtaaatacggttctcgctgaaattgaggccgatgagatcccggcgctgctggtgatgaacaaaatcgacatgcttgacgattttgaaccgcgcatcgatcgcgacgatgaaaataaaccgattcgggtctggctttcagcccagaccggggttggcgtaccactgctttttcaggcattaacggagcgtctttccggtgaagtggcccagcatacgctgcgcttaccgccgaaagaagggcgactgagaagccgtttctatcagcttcaggcgatagaaaaagagtggatggaggatgacggcagcgtgagtctgcaggtgcgcatgccgatcgttgactggcggcgcctctgtaagcaagagccaacgcttgttgactatgtggtttaaccttgcagcttgcctgaagatattgacccctgtggggatatcaaaaacaaatatggagcatatacatggcgtggaatcagcccggtaataacggacaggaccgcgacccgtgggggagcagcaaacctggcggcaactctgagggaaatggcaataaaggcggtcgcgagcaggggccgccggatctggatgatatcttccgcaagttaagtaaaaaacttggcgggctcggcggcggcaagggcggactgggcggcggcaatagcgcgcaggggcctcgcggaccgatgggcgggcgtattgtcggcatcgttgccgcggcggcagtgattatctgggcggccagcggtttctataccattaaagaggccgagcgcggcgtggtcacccgttttggtaagttcagccatctggttgagcctggcctgaactggaaaccgacctttatcgataacgttcaggcggtgaacgtggagtcggtgcgcgaacttgcggcttccggcgtcatgctgacctctgacgaaaacgtggtgcgcgttgagatgaacgtgcagtaccgcgtcaccgatccggagcgctatctgtttagcgtgaccagcgcggacgacagtctgcgtcaggccaccgacagcgcgctgcgcggcgtgatcggcaaatacaccatggatcgcattctgaccgaaggtcgtaccgtgatccgtagcgatacccagcgtgagctggaagagacgattcgcccgtacaacatgggtatcactctgctggacgtcaacttccagacggcgcgtccgccggaagaggtgaaggccgcgtttgacgatgccattgccgcgcgtgagaacgagcagcagtacattcgtgaagcggaagcgtataccaacgaagtccagccgcgggcgaatggtcaggcgcagcgtatcctcgaagaggcacgcgcctataagacccagaccgttctggaagcccagggtgaagtggctcgctttgcgaagatcctgccggaatacaaagccgcgccggaaattacccgcgagcgtctgtatatcgaaaccatggaaaaagtgctgagccacacccgtaaagtgctggtcaatgacagcaaaaacggcaatctgatggttctgccgctggatcagatgctgaaaggcgccgctgcgccggcagcaaagagcgatagcagtgacgccagcgatctgctgcgcctgccgccagcatccagctcaagcagcgccagcacctcatcaacctcgagctcaaccgggggtagcattatggaccaacgccgcgctaacgcgcagcgtaacgactaccagcgtcagggggaataacgatgcgtaaatctgttatcgcgatcattgtcatcgtgctggtagtgctctacatgtctgtctttgtcgtaaaggaaggcgagcgcggtatcacgctgcgtttcggtaaagttctgcgcgacgacgaaaacaagccgctggtgtatgcgccaggcctgcacttcaagatcccgtttatcgaatcggtgaagatgctggatgcgcgtattcagaccatggacaaccaggctgaccgtttcgttactaaagagaagaaagacctgatcgtcgactcctatatcaagtggcgcatcagcgacttcagccgttactacctggcaaccggcggcggcgacgtctcccaggccgaggtactgctgaagcgtaaattctctgaccgtctgcgttctgaaattggtcgtctggatgtgaaagatatcgtcaccgactcccgtggtcgcctgaccctggaagtgcgcgatgcgctgaactcgggttcggccggtacggaagatgaggttagcaccccggcggctgacgacgcgattgctaaagcggcagagcgtgtggaagccgaaaccaacggtaaagtgcaggtgatcaacccgaacagtatggcggcgctgggtatcgaagttgtcgacgtacgtatcaaacagatcaacctgccggcagaagtgtcggaagcgatttataaccgtatgcgcgcggagcgtgaagcggttgctcgtcgccatcgttcacagggtcaggaagaggcggaaaaactgcgcgcgactgcggactatgaagtcaccaagacgctggcggaagccgagcgccagggccgtatcctgcgtggtgaaggtgatgcggaatcagcgaaactgtttgccgacgcgttcagccaggatccaggcttctactcctttatccgtagcctgcgtgcctatgagaagagcttccagagcaatcaggatgtgatggtcctgagtccggacagcgatttcttccgctatatgcgttcaccggattcggtgcgtaaataagccggagaaggtgtaaacctgaagtaataatgcgaaaaggcgcctgaaacaggcgccttttttcatgctgcgagggcgggaattagttgccgagtagcttgttcagcaggccgccgatcaccggcaggcctgccagcgtactttcgatggtgccgccgatagaagagccgatgctttcgcctaaggttttgcccaggtccggcgccaggtcggccagattgagggtgccaagcagtggcaggttaatgctcagggcatcagtgcccatcgtccatgcggctgcgccgaccttgctgcctaaggccgccagaccatcctgtaaccagcctgcgccgctcacattttcgatttcaaatgcggttaattctctcatcataatcttcctgattaagtagacgtaccgggttgtagtacgcgatggcatagttacaatttaaaaaatatccagcaatacaattagttgtgaattttgtttcacctttccggttcataatgaagctgaaatacgggacaatgtgaaatgagggaatgaattcaccatgctggccgagacgcccgcgagggcggcaatgatacttttcaattagggttgacgatgaactccaccatttggctggcgctggcgctggttttagtacttgaagggcttggcccgctgctttatccgcgcgcctggcgcaagatggtcgccagcctgagccagctaccggataatttattgcgtcgttttggcggcggacttgtggttgccgggattgtgatctactacatgttgaggaaatcgattggctgatcaaaaagtggtcggatttgccttattttggatgcaaaaagtgctgtaactctgaaaaagcgatggtagaatccatttttaagcaaacggtgattttgaaaaatgggtaacaacgtcgtcgtactgggcacccaatggggtgacgaaggtaaagggaagatcgtcgatctcctgactgaacgggctaaatatgttgtgcgctaccagggtggtcacaacgccggccatactctcgtaatcaacggtgaaaaaaccgttctccatcttattccatcaggcattctgcgtgaaaacgtcaccagcatcatcggtaacggcgtcgtgctgtctccggccgcgctgatgaaagagatgaagggcctggaagaccgtggtatcccggttcgcgagcgtctgctgctctctgaagcctgcccgcttatccttgactatcacgtggcgctggacgtggcgcgtgaaaaagcgcgtggcgcgaaagcgatcggcactaccggtcgcggcattggcccggcttacgaagataaagtcgctcgtcgcggtctgcgcgttggcgatctgttcgataaagcaaccttcgccgataaactgaaagaagtgatggaatatcacaacttccagctggtgaacttctacaaagcagaagcggttgactaccagaaagtgctggacgatgtgatggcgattgccgacatcctgaccagcatggtggtggacgtatccgacctgctggatcaggcgcgtcagcgcggcgacttcgtgatgttcgaaggcgcgcagggaacgctgctggatatcgaccacggtacctacccgtacgttacgtcctctaacaccaccgcaggtggcgtggcgaccggctccggcctgggcccgcgttatgtggattacgttctcggtatcattaaagcgtactcaactcgcgtcggtgcaggtccgttcccgaccgagctgtttgatgaaactggcgagttcctctgcaagcagggtaacgaattcggcgccaccaccggccgtcgtcgtcgtaccggctggctggacgcggtcgcagtccgtcgcgcggtgcagattaactccctgtccggcttctgcctgactaaactggacgtcctcgacggcctgaaagaagtgaaaatctgcgttggctaccgtatgccggatggccgcgaagtgaccaccactccgctggctgccgataactgggaaggtatcgagcctatctacgaaaccatgccgggctggtccgaaaccaccttcggcgtgaaagagcgcagcggcctgccgcaggcagccctgaactacatccagcgtattgaagagctgaccggcgtgccggtggatatcatctctaccggtccagaccgtaccgagactatgattctgcgcgatccgttcgacgcgtaatcactctcaaggggcgccgttcgggcgcccttgtttttgctgttcgcccgccccatttcaaataaattagcggcctgagcgctggctggtttatcatcaataataatgatgtcgctcgacataccctgttttcttttccctgaggtttatgtgcagttaacgagtttcaccgattacggactacgcgcgctgatttatatggcgtcgctgccggaaggacgaatgaccagtatctcggaagtgaccgaggtctatggcgtctcccgtaatcatatggttaaaataatcaatcagttaagtcgcatgggctacgtgactgccgtgcgggggaagaacgggggcattcgcctcggcaaaccagcaggacagatccgcgtcggtgacgtggtgcgtgaccttgaacccttatcgctggtcaactgcagcagcgagttttgccacattacaccagcctgtcgtctgaaacaggcactagctgaagccgcgcagagttttctcaaggaactggataactatacgctggctgatttggttgagaagaatcaaccgctttataaattattgctggtggagtgacgccactctgccggagatgacaacggaggaaccgatatgtcacaagatccattccaggaacgcgaagctgagaagtacgcgaaccctatcccgagccgggaatttatcctcgaacatttaactaaacgggaaaagcctgccagccgcgatgagctggccatcgagttaaatatcgagggcgaagagcaaaccgaagcgctgcgccgccgcctgcgcgcgatggagcgcgacggtcagctggtcttcacccgccgccagtgctatgccctgccggaacgcctcgatctcctcaaaggaaccgttattggccaccgcgatggctatggtttcctgcgcgttgaagggcgcaaagacgatctgtacctgtcgtcagaacagatgaaaacctgtattcacggcgaccaggtgctggctcagccgctgggcgcggaccgtaagggccgccgcgaagcgcgcatcgtccgcgtcctcgtgccgaaaaccagccagatagttggccgttacttcaccgacgctggcgtcggctttgtcgtcccggacgacagccgcctgagctttgatatcctgatcccgccggaagagataatgggcgcgcggatgggctacgtggtcgtggtcgagctgacccagcgaccaacccgccgcaccaaagcggtgggtaagatcgtcgaagtgctgggcgacaacatgggcaccggcatggccgtcgatatggcgctgcgtacccatgaaattccgtatgtctggccgccggcggtggaaaaacaggtttccggtctcaaagaacaggtgccggaagaggcgaaggtcggacgcgtcgatttacgctcgctgccgctggttaccattgacggcgaagatgcccgcgacttcgatgacgcggtgtactgcgagaagaaacgcggcggcggctggcgcctgtgggtagccattgccgacgtcagctactacgtgcgcccggggacgccgctggatgcggaagcgcgcagtcgtggcacctcggtctacttcccgtcgcaggtagtgccgatgctgccggaagtgctgtctaacggtctatgctcgctgaacccgcaggtcgatcgcctgtgtatggtgtgcgagatgacgatttcgtcaaaaggccgtctgaccggttataaattctatgaagcggtgatgagttcacatgctcgcctgacctacaccaaagtgtggcatatgctgcagggtgaccaggaactgcgcgaacactacgcgccgctggtgaagcacattgaagagctgcataacctctacaaagtgctggagagcgcccgcgaagagcgcggtggtatctcatttgaaagtgaagaagctaaattcatcttcaatgccgaacgccgtattgagcgtatcgaacagactcagcgtaacgatgcgcataagctgattgaagagtgcatgatcctggcgaacatctccgccgcgcgcttcgttgagaaggcgcaggagccggcgctgttccgtatccatgataagccaaccaccgaagcgattacctccttccgtaccgtgctggctgagctgggactggagctgcctggcggcaacaagccggagccgcgtgattacgccgagctgctaacctccatcgccgatcgcccggatgcggaaatgctgcagacgatgctcctgcgctccatgaagcaggcggtctacgatccggaaaaccgcggtcactttggcctggcgctgcagtcatacgcccacttcacctcgccgattcgtcgttacccggacctgtcgctgcaccgcgctatcaagtatctgctggccaaagagcagggacataaaggcaacagcaccgagaccggcggctggcactacagcatggaagagatgctccagctgggtcagcactgttcgatgaccgagcgccgcgccgacgaagcgacgcgcgaagtgtctgactggctgaagtgcgacttcatgcaggatcaggtgggcaacatcttctctggcgtgatcgccagtgtgaccggctttggcttcttcgtccgcctgaacgatctgtttatcgacggtctggtgcatgtttccagcctggataacgactattatcgtttcgaccaggtggggcagcgtcttattggtgagtccggcggccagacctatcgcctgggcgaccgcgtggaagtccgtgtggaagcggtcaacatggacgagcggaaaatcgactttaccctgatctccagcgagcgtgcgccgcgtaatgtcggcaagaccgcccgtgagaaagcgaaaaagagtacctctggcaagccgggcggccgtcgccgccaggtgggtaagcaggtaaacttcgagccggacagcgctttccgtaaagagaaagagaccgcccgaccgaagaaagagaaaaaagcgaaaaaaccgtcggcgaaaacacagaaaatcgccgccgcgacgaaagccaagcgcgcggccaagaagaagatcgccgagtgattgacctcccttcaccctgaagtctgctgacgcaggatggggtgaagggggcagataacagaacctaaaacgagtacatcaatgagtgaaatgatttacggcatccatgcggtgcaggcactgctggagcgcgcacctgagcgttttcaggaagtttatattctgaaaggccgtgaggataagcgcttgctgccgctgatccatgccctggaagcgcagggcgtggtgattcagctggccaaccgtcagtttcttgatgagaagagcgaaggcgctgtgcaccaggggatcattgcccgcgtgaagccggggcgtcagtatcaggagaacgatctgccggatctgctggcgcagctcgatcaaccgttcctgctgatcctcgacggcgtaaccgatccgcacaacctcggcgcctgcctgcgtagcgctgacgccgccggcgtgcatgcggtgatcgtgccaaaagatcgttccgctcagttgaatgcgacggcgaagaaagtggcctgcggcgcggcggagaacgtcccgctgatccgcgtcaccaacctggcgcgcaccatgcgtctgctgcaggaagagaacgtctggatcgtcggaaccgcaggggaagccgaccatacgctgttccagagcaaaatgaccggcccgatggcgctggtgatgggcgcggaaggcgaaggcatgcgtcgtctgacccgcgaacactgtgatgaattgatcagcatcccgatggcgggcagcgtctcctcgctgaacgtctcggtggctaccggcatctgtctgtttgaagcagtacgccagcgcagctaagctgaaccatcgacgaatcaaaaaaaagccatcctccgggatggcttttttgtgaccgctctcgcgggcgagtatccctccggataaccatacttatggctatcgccattgatggagggagacacgatgcactggcaaacgcacaccgtttttaatcaacccaccccgctgaataacagcaatctgtttctgtccgataccgctctgcgtgaagccgtggtccgcgaaggcgccggctgggatggcgatctgctcgccagcattggccagcagctggggacagccgaatcgctggagctgggacgcctggccaacagcaatccgccggagctgctgcgctatgacgccaccggcgcccggctggacgacgtgcgcttccatcccgcctggcacctgctgatgcaggggctgtgcgcgaaccgggtacataatctcgcctggcaggaggatgcccgcgaaggcgcgtttgtcgcccgcgccgcccgctttctgctccatgcccaggtggaggccgggacgttgtgcccgattaccatgaccttcgccgcaacgcccctgctgcagcacgccctgcccgcgccctttcgcgactggctgtcgccactgctgagcgaccgttacgatccgcaccttgcgcctggcggccagaagcgcggcctgctgatcggcatggggatgaccgagaagcaaggggggtctgatgtgctgagcaataccactcgcgcggagaaaacggcggaagggttttaccgactggtgggacacaagtggttcttctcggtgccgcagagcgatgctcacctggtgctggctcaggctccgacggggctctcatgcttctttgtgccgcgtctgctgcccgacgggcagcgtaacggcgtgcgtcttgaacgcttgaaagagaagctcggcaaccgctccaacgccagtagcgaagtggagttttatgatgcctgcggctggctggtgggcgacgaaggcgacggcgtgcggcagatcctcaggatgggcggcctgacccgctttgactgcgcgctgggcagccatgccctgatgcgtcgcgccttctcggtggcgctgtatcacgcgctacagcgtcaggcgtttggcaaaaacctggtcgaacagccgatgatgcgccagttgctggggcaaatggcgctccgtctggaggggcagaccgcgtttctgtttcgcctggcgcgggcctgggaccgtcgggatgatgcccgggaaagcgcctgggcgcgcctgtttacgcctgcggccaagtttgccatctgtaaggccggtatcccgtttgtcgccgaggcgatggaagtgctgggcggcatcggctattgcgaggagagcgaactaccgcggttgtatcgcgagatgccggtcaacagcatctgggaaggctccggcaatattatgtgcctcgatgtgatgcgggtgctgagcaagcagccggcggcgatggagctgctggccgcggagtgtgcggaggtgaaaggacagaaccgccatctcgaccgcgcatggcgtcagctgcagcaactgctgaaacgacccgccgaagagcaggggagagagattgcccggctggtctatcgtcttggcgcgggggcgcagatgctgcgccatgcttcgccgccgctggccgaagcctggtgccggatgatgctcgacacccgcggcggcatacgtcttgacgcgccgaccctcgacgatctgctgctgcgggctatggggcgcgggcgccaggcgcctcaggcgtagagaatggcctgcacgcgccagctgtccggctgttgttcctcgtacatctgaataatgcgataccaggaggcgccttgctcgtctgctttgcgggcaatggcgtgctctacatcctgttggctaccggaaagattagtgacggagatcagaccgatttcattcaggccagtgacgcaatccgcgctggcgaattcggctgactgcgcggacgtattggccgtcgcagcggttaacagcaggctggatagggtaaaagatcgtttcatcgtcagctccatttcacgtagtcccaagggcagtccgttgctaacgtcctgccaggtggctggccgaacgttattatgcacaggagaacgtgaatggacgcaaagctgtgtaaagcagatttaaagacgccgcctcgttatcgacgatagaggatcgcctgcgaataccactggccgggtaccatagtgtcatcgatcatgatgatgacgtagtaatcggctttggccgcttctgctttggccttcagcgccgcttcgacatccatcggcgaaccgtacatcagtacgcttaccgtggccattttctgcaggccagcagtctggtagcgctggatctcctgcggatggtcggtggcgggcggcggggcttccggcgttccctgcagggcgctacacccgctgaggacgatagccagtaaccacggtgaaaacctgcgcataaccatatctcgtttcctgatagtgatagtgtagtggtagccttaacaggattgccggggaatgttcccgaactgttatctctgacgcgattttcgaatgaaaatgttgtgaaagcgtaaccgggttctcaacattatgaatcgtagcaaactgggttgcctggtgaatgaattttcccatgacgcctaaccacgatagagaaggaagacgataaatgattgcactagaaatgcgcaacctcggcggtggtgaaattttacatgcctgtccgcaggagagtctggataagcccttgccctgtatcgtcttttatcatggctttacctcgtcgaagctggtctacagctactttgcggtggcgctggccgaggccggattccgggtgatcatgccggacgcgccggagcatggggcgcgctatcagggcgatgaggccgggcggatgcagcgcttctggccgattctgcagcagaatttcagggagtttcctgcgctgcgcgaggcgataatcgctgaaggatggctggaaggggagcggctggcggtggcgggcgcttcgatggggggaatgacggcgttgggcatcatgacgcatcaccccgagctgaacagcgtcgcctgtctgatggggtcgggctattttcgttccctgtcgcaaaccctgttcccctcgcctgattttgatgtcgatagcctcaacgaatgggatgtcagccatcagctggcgtcccttgcccggcgaccgctgctgctctggcatggcgatgccgatgacgtggtgccgccggaagaaacctttcgactagaacaggcgctccggcaaggcgatcttgccgccaggctgacctgtgtctggcagaaaggcgtccgccatcgcattacgccagaggcgctggctaccacggtcgccttttttcagcagcacctttaaacgcggattacgctgacgccttgatcctcaagctgtttgaggatcgcggcatcggcctgtttgccggtgatcaccacgtctatttgtccggcctggctgaatagcatcccggcgcgctcgccgatcttgctgctgtcgaccagcaccgccagtttgccgaccacgttaagcattttttgctcggccatggcggtcaacatatccgttttgtagaggccttcggcggtgagccctttgccgctggtaaacatccagtgtccggcatagaggctgttctcgctaccgtgggggctgagggtgatggcgtggctgcggttgtactggccgcccatgataatcacgctgtcatgctcctggtcgatcaggtagttagccagcggtagatagttggtgatgatctgcaccggtttgccgcacagttcccgacccaacagaaaggcggtggagccgcagttaatgacgatgctctcacccggcgcgatcagttgcgaagcggcgcgtgcaatacgcactttttcatccagattttgcgcctggtggatgttcatcggcgtccagcgggggcgctgttcgctaatggcttccgcgccattacgaacctttttcagtttgccgctttcatccagcttgttgatatcacgtcgggcggtagcgggtgagatcccgagccgcgacatcacctgctccacggtaacaaaccccgtttgggcgagcagatccagcagaatttggtgcctttgcgcttccgtcatgagcgaatccgattaaaagtgaacggcaaagatgatatttgaaatcatgtgaaaatactaaccctgcggcggggtatttccggcaggcagggcctgccggcggcgacttacaggaaggatttgaaaggcagatccggctcaatggtgaagcaatcgtcgaaaccgcgcgggtagtgatattcgaaattgtctttatccagcggccaggtaaatttgccgccgacctgccagataaacggcttgaagccgtacttcagacgatcctttttcatctcccacagaacgcggatctcctgcggatcggcctgaaagtttgaccagatatcatggtggaacgggatcacaactttggcgttgagcgactctgccatgcgcaggatatcggcgctggtcattttgtcggtgatcccgcgcgggttctcgccatacgagccgagggcgacgtcaatccgatgctcgttgccatgcttcgcgtagtagttggagtagtgggaatcgccgctgtggtacaggttgccgcccggtgttttaaacaggtagttgaccgcgcgctggtccatgccgtccggcagtacgccagcggctttttggtccgccgggagggtgatcagcgcggtgcgatcgaacgcatcgagcgcatggatctcaatgtctttgatcttcacgacatcgccaggtttcatgacgatacagcgcgctttcggcacgccccaaccgatccacaggtcgacgcaggttttcgggccgataaacggcacatcggccgggcagttctgcatgacggcggcggcgacgttgacgtcaatatgatcgttgtgatcgtgggtcgcgaggaccgcgtcaatctggcgaatggcgaacggatccagcacgaacggcgtggtgcgcaggttaggctgtaattttttcacgcctgccatccgctgcatctggtggccggttttcatcagcggattgccgtggctctgtttgccagtgccgcaccagaaatcgacgcagacgttagccccgccttcggattttaaccagataccggtacagccgagccaccacatggcgaaggtgccgggcgcaacctgctcctgctcaatctcttcattcagccagcagccccattccggaaaggtgttcaggatccatgattcacgggtgatggtctgtactttactcatcgtgctcttcctcgtattttcaatagtaatcaaattttgattggttttgatttatgttgtcactggattttcaagattgcaatcttgttttccatcaattttacgaagagatgcgcatcatctctcagggggtccagcatccataaaggttgtgctttgttttatctatatgatttgaaaatgtttaattatgtttcggcgctactgatcggcaatagtcacaatgaaatagaggattattgcggcgcgcgtcacatttaatcaaattcaatcttgttgtgattatttttgattattagagtgggcagcgagaaatgctgagcgtaaggcgcgttcagcgccttcaccatcgggagtgtgttatggcaatcctctacaacatctttaccgttttctttaatcaggtgatgaccaatgccccgctgctgctgggtatcgtcacctgtctgggctatatcctgctgcgcaaaagcgtcagcgtgattattaaaggcacgatcaaaaccattatcggcttcatgctgttacaggccggctccggcatcctcaccagcacttttaaaccggtggtggcgaaaatgtcagaggtgtacggcatcaacggcgcgatctctgacacctatgcctcgatgatggcgaccatcgaccggatgggcgaggcctatagctgggtgggctatgcggtgctgctggcgctggcgctcaacatctgttacgtcctgctgcgccggataaccggcatccgcaccatcatgctgactggccatatcatgtttcagcaggcggggctgatcgccgtctcgttctttatctttggttacggaatgtggacgaccatcatctgtaccgccgtgctggtctccctgtactggggtatcacctccaacatgatgttcaagccgactcagctggtcaccgacggctgcggcttctccatcggtcaccagcagcagtttgcctcgtggattgcctacaaagtggcgccgtatctggggaaaaaagaggagagtgtggaagacctcaagctgccaggctggctcaatatcttccacgacaacatcgtttccaccgcgattgtcatgaccattttctttggcgcgatcctgctttcctttggtattgacgtcgtgcaggcgatggcggggaaaacccactggacggtctatatcctgcagaccggtttctccttcgcggtggccattttcatcattacccagggcgtgcggatgttcgtcgccgaactgtccgaagccttcaacggtatctcgcaacgcctgatccccggcgcggtgctggcgattgactgcgccgcgatctatagctttgcgccgaatgcggtggtgtggggctttatgtggggcaccatcggccagctgattgccgtcggcattctggttggcattggctcttcaattctgattattccgggctttatcccgatgttcttctccaacgcgacgattggtgtctttgccaaccacttcggcggctggcgcgcggcgctcaaaatctgcctggtgatgggcatggttgaaattttcggttgcgtgtgggcggtgaagctcaccggtatgagcgcctggatgggaatggcggactggtcgattctggcgccgccgatgatgcagggcttcgcctccatcgggctggcgtttatggccgtcatcatcctgattgctctcgcttatatgttctttgctggccgcgcgctgcgcgccgaagaagacgcggaaaaacaactggcagaggcctctgcccaataaggagttctgattatgaccgtacgtattctggctgtgtgtggtaacgggcaaggcagttctatgatcatgaaaatgaaagtggatcagttcctgacgcaatccaatatcgaccacacggtgaacagctgcgcggtgggtgaatacaaaagcgaactaaacggcgcggatatcatcatcgcttcaacccatatcgcgggggagattaccgtctccggcaataaacacgtggtgggggtgcgtaatatgctttcccccgcggatttcgggccaaagctgctggaggtgattaaagctcatttcccgcaggacgtgaaataaggagcggccatgaaactccatgaatcactggcgcagaatcactccattcgcctgcaggcggaagcggaaacctggcaggaggcggtgaaaatcggcgtcgatctgctggtggccgccgacgtggtggaaccgcgctactaccaggcaattctcgacggcgtcgcgcagcacggcccctattttgtgatcgctccgggattagccatgccgcacgggcggccggaagagggcgtcaaaaaaaccggctttgcgctggtcacgctaaagaaaccgctgattttcaaccacgaagataacgacccggtcgacatcctgatcaccatggcggcggttgacgccaccacccaccaggaagtgggcatcatgcagatcgttaacctgtttgatgacgaagccaatttcgaccgtttacgcgcctgccgcagcgagcaggaagtgctggatttaatcaaaaacgccaccgcggcggctgtttaaaaggaacactatcatgtcattacctatgttacaggtcgccctcgacaaccaaacgctggccagcgcttatgaaacaacccgtctgatcgccgaagaggtagatatcattgaagtcggcactatcctctgcgtcggtgaaggtgtacgcgcggtgcgcgatctgaaagcgctgtatccgcataaaatcgtgctggcggacgccaaaattgccgatgcaggcaagatcctgtcgcggatgtgcttcgaagccaacgccgactgggtcacggtgatctgctgcgccgatatcaacaccgccaaaggggcgctggatgtcgccaaagagttcaacggcgatgtgcaaattgagctgaccggcttctggacctgggaacaggcgcaggcgtggcgcgaggcgggtattcagcaggtggtctatcaccgcagccgcgacgcgcaggcggcaggcgtggcgtggagtgaggcggatatcagcgcgattaagcgtctgtctgatatgggcttcaaagtgaccgtcaccggcgggctggcgctggaggacctgccgctgtttgccgggatccctgttcacgtctttattgccggacgcagcatccgcgatgctgcctcgccggtggaagcggcgcgccagtttaaacgctctatcgcccagctgtggggttaaggagcgactatgttggcgaaatccattccgctcggcatctatgaaaaagcgctccccgccggggagtgctggctggagcggctaaagcttgcaaaagcgctgggctttgatttcgttgagatgtctctcgatgaaacggacgcccgccttgcgcggctggactggagcccggagcagcgtctggcgctggtcaaggcggtggctgaaaccggcgtccgggtgccgtcgatgtgccttagcgcccatcgccgttttccgctgggtagtgaagacgacgcggtgcggcatcaggggctggagatcatgcgtaaagccatccgcctggcgcaggatgtggggattcgggtgatccagctggcaggctacgacgtctattaccagcaggcgaacgatgagacgcgccgccgctttcgcgacggcctgaaacagagcgtcgagatggccagccgagcccaggtaaccctggcgatggagatcatggactacccgctgatgaactcgatcagtaaagcgctgggctatgcccattacctgaataatccgtggttccagctttacccggatatcggcaatctgtcggcgtgggataacgacgtccagatggagctgaaggcggggagcgggcatatcgtggcggtacacgtcaaagacacgaagcccggcgtctttaaaaacgtgccgttcggcgaaggggtggtcgattttgaacgctgcttcgaaacgctcaagcagaccggctactgcggcccgtacctgattgagatgtggagcgaaaccagcgctgacccgctggcggaggtggcgaaggcgcgtgactgggtgaaggcgcggatggcccgcgcgggcctgatggaggcggcataatgcaacagctgaaacagcaggtgttcgaggccaatatggatctgccgcgctacggcctggtgacctttacctggggtaacgttagcgccattgatcggcagcgtgggctggtggtgattaagcccagcggcatcgcctacgagtcaatgaccgtcgatgacatgtcggtggttgatctgcaggggcacgtggtggaagggcgctggcgtccctcctctgataccgccacccatctggcgctctatcgccgttatcccgaccttggcggggtggtgcatacccattcgacgcacgccaccgcctgggcgcaggcggggctggcgatcccagcgctcggcaccacccatgcggactacttcttcggcgatattccctgcacccgggcgcttagcgcacaggaggtggacgaggcctacgagctgaacaccgggcaggtgattatcgaaacgctgggtgaggccaatccgctgcataccccggggatcgtcgtctatcagcacgggccatttgcctggggcaaagacgcccacgaggcggtacacaacgcggtggtgatggaagaggtggcgtgcatggcgtggattgcccgcggcattaatccgcagttgcagcccatcgatagctggctgatgaataagcattttcagcgtaagcatgggccaaacgcctactatgggcaaaagtagatagcgcgctccggggctttcaccgtcacggtgaaacaactggtctggccccggagccgtttttaatcctgacgataggccgacggcatcacgcgcatgccgatgagcgtgaccacgcaaattatcgccccagcgtaaaacgttgccccgcgagcggagggcggcttttatctt
